(19) United States
(12) Patent Application Publication
(10) Pub. No.: US 2003/0194721 A1
(43) Pub. Date: Oct. 16, 2003

(54) Genes expressed in treated foam cells

(75) Inventors: Thomas Mikita, San Francisco, CA (US); Dov Shiffman, Palo Alto, CA (US); J. Gordon Porter, Newark, CA (US); Matthew R. Kaser, Castro Valley, CA (US)

Correspondence Address: INCYTE GENOMICS, INC., 3160 PORTER DRIVE, PALO ALTO, CA, 94304, US

(73) Assignee: Incyte Genomics, Inc., Palo Alto, CA (US)

(21) Appl. No.: 10/247,671

(22) Filed: Sep. 18, 2002

Related U.S. Application Data
(60) Provisional application No. 60/323,784, filed on Sep. 19, 2001.

(51) Int. Cl. C12Q 1/68; G01N 33/53; C07H 21/04; C12P 21/02; C12N 9/00; C12N 5/06

(52) U.S. Cl. 435/6; 435/7.1; 435/69.1; 435/70.21; 435/183; 435/320.1; 435/325; 536/23.2

(57) ABSTRACT

The invention relates to isolated polynucleotides, purified polypeptides, and compositions comprising pluralities of polynucleotides that are differentially expressed when foam cells are treated with oxidized low-density lipoprotein and LPS as associated with atherosclerosis. The invention also presents the use of the polynucleotides as elements on a substrate and provides methods for using the polynucleotides and polypeptides.

[0001] This application claims benefit of provisional application Serial No. 60/323,784, filed Sep. 19, 2001.

### FIELD OF THE INVENTION

[0002] The present invention relates to a combination of polynucleotides which may be used to detect the differential expression of genes in human foam cells treated with oxidized low-density lipoprotein and/or lipopolysaccharide (LPS). In particular, the combination may be used in the diagnosis of conditions, diseases, and disorders associated with cardiovascular disease.

### BACKGROUND OF THE INVENTION

[0003] Atherosclerosis and the associated coronary artery disease and cerebral stroke represent the most common cause of death in industrialized nations. Although certain key risk factors have been identified, a full molecular characterization that elucidates the causes and provides care for these associated diseases has not been achieved. Molecular characterization of growth and regression of atherosclerotic vascular lesions requires identification of the genes that contribute to formation of the lesion including growth, stability, dissolution, rupture and, most lethally, induction of occlusive vessel thrombus.

[0004] An early step in the development of atherosclerosis is formation of the “fatty streak”. Lipoproteins, such as the cholesterol-rich low-density lipoprotein (LDL), accumulate in the extracellular space of the vascular intima, and undergo modification. Oxidation of LDL occurs most avidly in the sub-endothelial space where circulating antioxidant defenses are less effective. The degree of LDL oxidation affects its interaction with target cells. “Minimally oxidized” LDL (MM-LDL) is able to bind to LDL receptor but not to the oxidized LDL (Ox-LDL) or “scavenger” receptors that have been identified, including scavenger receptor types A and B, CD36, CD68/macrosialin, and LOX-1 (Navab et al. (1994) Arterioscler Thromb Vasc Biol 16:831-842; Kodama et al. (1990) Nature 343:531-535; Acton et al. (1994) J Biol Chem 269:21003-21009; Endemann et al. (1993) J Biol Chem 268:11811-11816; Ramprasad et al. (1996) Proc Natl Acad Sci 92:14833-14838; and Kataoka et al. (1999) Circulation 99:3110-3117). MM-LDL can increase the adherence and penetration of monocytes, stimulate the release of monocyte chemotactic protein 1 (MCP-1) by endothelial cells, and induce scavenger receptor A (SRA) and CD36 expression in macrophages (Cushing et al. (1990) Proc Natl Acad Sci 87:5134-5138; Yoshida et al. (1998) Arterioscler Thromb Vasc Biol 18:794-802; and Steinberg (1997) J Biol Chem 272:20963-20966). SRA and the other scavenger receptors can bind Ox-LDL and enhance uptake of lipoprotein particles.

[0005] Mononuclear phagocytes enter the intima, differentiate into macrophages, and ingest modified lipids including Ox-LDL. In most cell types, cholesterol content is tightly controlled by feedback regulation of LDL receptors and biosynthetic enzymes (Brown and Goldstein (1986) Science 232:34-47). In macrophages, however, the additional scavenger receptors lead to unregulated uptake of cholesterol (Brown and Goldstein (1983) Annu Rev Biochem 52:223-261) and accumulation of multiple intracellular lipid droplets producing a “foam cell” phenotype. Cholesterol-engorged and dead macrophages contribute most of the mass of early “fatty streak” plaques and typical “advanced” lesions of diseased arteries. Numerous studies have described a variety of foam cell responses that contribute to growth and rupture of atherosclerotic vessel wall plaques. These responses include production of multiple growth factors and cytokines, which promote proliferation and adherence of neighboring cells; chemokines, which further attract circulating monocytes into the growing plaque; proteins, which remodel the extracellular matrix; and tissue factor, which can trigger thrombosis (Ross (1993) Nature 362:801-809; Quin et al. (1987) Proc Natl Acad Sci 84:2995-2998). Thus, cholesterol-loaded macrophages which occur in abundance in most stages of the atherosclerotic plaque formation contribute to inception of the atherosclerotic process and to eventual plaque rupture and occlusive thrombus.

[0006] During Ox-LDL uptake, macrophages produce cytokines and growth factors that elicit further cellular events that modulate atherogenesis such as smooth muscle cell proliferation and production of extracellular matrix. Additionally, these macrophages may activate genes involved in inflammation including inducible nitric oxide synthase.

[0007] In vivo, infectious agents like cytomegalovirus and Chlamydia pneumoniae have been linked to atherosclerosis (Boer et al. (2000) J Pathol 190:237-243; Temesgen (2001) Expert Opin Pharmacother 2:765-772). For example, proinflammatory stimuli such as LPS or tumor necrosis factor-alpha (TNF-α) activate endothelial cells (EC) and inhibit EC apoptosis through induction of nuclear factor kappa B (NF-κB)-dependent genes, such as antiapoptotic gene A20, whereas OxLDL suppresses such induction (Heermeier et al. (2001) J Am Soc Nephrol 12:456-463). These and other studies implicate a role for activated macrophages and other inflammatory cells in the development and progression of atherosclerosis. Thus, genes differentially expressed during foam cell stimulation may reasonably be expected to be markers of the atherosclerotic process.

[0008] The invention provides for a combination comprising a plurality of polynucleotides for use in detecting changes in expression of genes encoding proteins that are associated with cardiovascular disorders. The invention satisfies a need in the art by providing a combination of polynucleotides that represent differentially expressed genes which may be used entirely or in part to diagnose, to stage, to treat, or to monitor the progression or treatment of a subject with a cardiovascular vascular disorder.

### SUMMARY OF THE INVENTION

[0009] The invention provides a combination comprising a plurality of polynucleotides wherein the polynucleotides have the nucleic acid sequences of SEQ ID NOs:1-127, and the complements of SEQ ID NOs:1-127, that are differentially expressed following treatment of the foam cells with LPS. The invention also presents a combination comprising a plurality of polynucleotides wherein the polynucleotides are SEQ ID NOs:16-105 and 108-127 that are early markers of foam cell formation and the complements of SEQ ID NOs:16-105 and 108-127. The invention further presents a combination comprising a plurality of polynucleotides wherein the polynucleotides are SEQ ID NOs:16-105 and 108-127 that are upregulated following treatment with LPS and the complements of SEQ ID NOs:16-105 and 108-127. The invention still further presents a combination comprising a plurality of polynucleotides wherein the polynucleotides are SEQ ID NOs:1-15 and 106-107 that are downregulated following treatment with LPS and the complements of SEQ ID NOs:1-15 and 106-107. In one aspect, a combination is immobilized on a substrate. In another aspect, a combination is useful to diagnose a cardiovascular disorder.

[0010] The invention provides a high throughput method to detect differential expression of one or more of the polynucleotides of the combination. The method comprises hybridizing a substrate containing the combination with the nucleic acids of a sample, thereby forming one or more hybridization complexes, detecting the hybridization complexes so formed, and comparing the hybridization complexes with those of a standard, wherein differences in the size and signal intensity of each hybridization complex indicate differential expression of nucleic acids in the sample. In one aspect, the nucleic acids of the sample are amplified before hybridization. In another aspect, the sample is from a subject with a cardiovascular disorder and differential expression determines the stage of the disorder.

[0011] The invention provides a high throughput method for using a combination comprising a plurality of polynucleotides to screen a library or a plurality of molecules or compounds to identify a molecule or compound which specifically binds each polynucleotide of the combination, the method comprising contacting a substrate comprising the combination with a library or a plurality of molecules or compounds under conditions to allow specific binding and detecting specific binding between a molecule or compound and each polynucleotide, thereby identifying a molecule or compound that specifically binds each polynucleotide. In one aspect, the library or plurality of molecules or compounds is selected from DNA molecules, peptides, proteins, and RNA molecules. The invention also provides a method for using a combination comprising a plurality of polynucleotides to identify and purify a ligand, the method comprising contacting a substrate containing the combination with a sample under conditions which allow specific binding between a ligand and each polynucleotide and separating each polynucleotide from its ligand, thereby identifying and obtaining purified ligand.

[0012] The invention provides an isolated polynucleotide encoding a protein having an amino acid sequence selected from SEQ ID NOs:154 and 155. The invention also provides an isolated polynucleotide selected from SEQ ID NOs:51, 52, 54, 79, 85, 102, 106, and 119 and the complements of SEQ ID NOs:51, 52, 54, 79, 85, 102, 106, and 119. The invention further provides an expression vector containing the polynucleotide, a host cell containing the expression vector, and a method for producing a protein comprising culturing the host cell under conditions for the expression of protein and recovering the protein from the host cell culture.

[0013] The invention provides a purified protein comprising an amino acid sequence selected from SEQ ID NOs:154 or 155, a biologically active fragment of SEQ ID NOs:154 or 155, and an antigenic epitope selected from SEQ ID NOs:154 or 155. In one alternative, the invention provides an isolated protein comprising the amino acid sequence of SEQ ID NO:154. In another alternative, the invention provides an isolated protein comprising the amino acid sequence of SEQ ID NO:155. The invention also provides a high-throughput method for screening a library or plurality of molecules or compounds to identify at least one ligand which specifically binds a protein, the method comprising contacting the protein with the molecules or compounds under conditions to allow specific binding and detecting specific binding, thereby identifying a ligand which specifically binds the protein. The library or plurality of molecules or compounds are selected from agonists, antagonists, antibodies, DNA molecules, small molecule drugs, immunoglobulins, inhibitors, mimetics, peptide nucleic acids, peptides, pharmaceutical agents, proteins, RNA molecules, and ribozymes. The invention further provides a method for using a protein to purify a ligand, the method comprising combining the protein or a portion thereof with a sample under conditions to allow specific binding, recovering the bound protein, and separating the protein from the ligand, thereby obtaining purified ligand. The invention still further provides a method for using the protein to produce an antibody, the method comprising immunizing an animal with the protein or an antigenic determinant thereof under conditions to elicit an antibody response, isolating animal antibodies, and screening the isolated antibodies with the protein to identify an antibody which specifically binds the protein. The invention yet still further provides a method for using the protein to purify antibodies which specifically bind to the protein.

[0014] The invention provides a purified antibody. The invention also provides a method of using an antibody to detect the expression of a protein in a sample, the method comprising contacting the antibody with a sample under conditions for the formation of an antibody:protein complex and detecting complex formation wherein the formation of the complex indicates the expression of the protein in the sample. In one aspect, complex formation is compared to standards and is diagnostic of a cardiovascular disorder. The invention further provides using an antibody to immunopurify a protein comprising combining the antibody with a sample under conditions to allow formation of an antibody:protein complex, and separating the antibody from the protein, thereby obtaining purified protein. The invention provides a composition comprising a polynucleotide, a protein, an antibody, or a ligand which has agonistic or antagonistic activity.

### DESCRIPTION OF THE FIGURES AND TABLES

[0015] A portion of the disclosure of this patent document contains material which is subject to copyright protection. The copyright owner has no objection to the facsimile reproduction by anyone of the patent document or the patent disclosure, as it appears in the Patent and Trademark Office patent file or records, but otherwise reserves all copyright rights whatsoever.

[0016] The Sequence Listing is a compilation of polynucleotides and their encoded polypeptides obtained by sequencing clone inserts (isolates) of different cDNAs and identified by hybrid complex formation using the cDNAs as probes on a microarray. Each sequence is identified by a sequence identification number (SEQ ID NO) and by an Incyte ID number. The Incyte ID number represents the gene sequence that contains the clone insert.

[0017] FIGS. 1A, 1B, and 1C show the protein (SEQ ID NO:154) encoded by the polynucleotide having the nucleic acid sequence of SEQ ID NO:51 as produced using MACDNASIS PRO software (Hitachi Software Engineering, South San Francisco Calif.).

[0018] FIGS. 2A, 2B, 2C, and 2D show the protein (SEQ ID NO:155) encoded by the polynucleotide having the nucleic acid sequence of SEQ ID NO:54 as produced using MACDNASIS PRO software (Hitachi Software Engineering).

[0019] Table 1 shows the differentially expressed genes associated with foam cells treated with LPS identified by cluster analysis.

[0020] Table 2 shows a identification (ID) map for each polynucleotide and its encoded polypeptide.

### DETAILED DESCRIPTION OF THE INVENTION

[0021] Definitions

[0022] “Antibody” refers to intact immunoglobulin molecule, a polyclonal antibody, a monoclonal antibody, a chimeric antibody, a recombinant antibody, a humanized antibody, single chain antibodies, a Fab fragment, an F(ab′)₂ fragment, an Fv fragment; and an antibody-peptide fusion protein.

[0023] “Antigenic determinant” refers to an antigenic or immunogenic epitope, structural feature, or region of an oligopeptide, peptide, or protein which is capable of inducing formation of an antibody which specifically binds the protein. Biological activity is not a prerequisite for immunogenicity.

[0024] “Array” refers to an ordered arrangement of at least two polynucleotides, proteins, or antibodies on a substrate. At least one of the polynucleotides, proteins, or antibodies represents a control or standard, and the other polynucleotide, protein, or antibody of diagnostic or therapeutic interest. The arrangement of at least two and up to about 40,000 polynucleotides, proteins, or antibodies on the substrate assures that the size and signal intensity of each labeled complex, formed between each polynucleotide and at least one nucleic acid, each protein and at least one ligand or antibody, or each antibody and at least one protein to which the antibody specifically binds, is individually distinguishable.

[0025] “Cancer” includes an adenocarcinoma, leukemia, lymphoma, melanoma, myeloma, sarcoma, teratocarcinoma, and cancers of the adrenal gland, bladder, bone, bone marrow, brain, breast, cervix, colon, esophagus, gall bladder, ganglia, heart, kidney, liver, lung, muscle, ovary, pancreas, parathyroid, penis, pituitary gland, prostate, salivary glands, skin, small intestine, spleen, stomach, testis, thymus, thyroid, and uterus

[0026] A “combination” comprises at least two sequences selected from SEQ ID NOs:1-127 and their complements as presented in the Sequence Listing.

[0027] “Polynucleotide” refers to an isolated polynucleotide, cDNA, or nucleic acid sequence that may have originated recombinantly or synthetically, be double-stranded or single-stranded, represents coding and noncoding 3′ or 5′ sequence, generally lacks introns and may be purified or combined with carbohydrate, lipids, protein or inorganic elements or substances as a useful composition.

[0028] The phrase “polynucleotide encoding a protein” refers to a nucleic acid whose sequence closely aligns with sequences that encode conserved regions, motifs or domains identified by employing analyses well known in the art. These analyses include BLAST (Basic Local Alignment Search Tool; Altschul (1993) J Mol Evol 36:290-300; Altschul et al. (1990) J Mol Biol 215:403-410) and BLAST2 (Altschul et al. (1997) Nucleic Acids Res 25:3389-3402) which provide identity within the conserved region. Brenner et al. (1998; Proc Natl Acad Sci 95:6073-6078) who analyzed BLAST for its ability to identify structural homologs by sequence identity found 30% identity is a reliable threshold for sequence alignments of at least 150 residues and 40% is a reasonable threshold for alignments of at least 70 residues (Brenner, page 6076, column 2).

[0029] A “composition” refers to the polynucleotide and a labeling moiety; a purified protein and a pharmaceutical carrier or a heterologous, labeling or purification moiety; an antibody and a labeling moiety or pharmaceutical agent; and the like.

[0030] “Derivative” refers to a polynucleotide or a protein that has been subjected to a chemical modification. Derivatization of a polynucleotide can involve substitution of a nontraditional base such as queosine or of an analog such as hypoxanthine. These substitutions are well known in the art. Derivatization of a protein involves the replacement of a hydrogen by an acetyl, acyl, alkyl, amino, formyl, or morpholino group. Derivative molecules retain the biological activities of the naturally occurring molecules but may confer longer lifespan or enhanced activity.

[0031] “Differential expression” refers to an increased or upregulated or a decreased or downregulated expression as detected by absence, presence, or at least two-fold change in the amount of transcribed messenger RNA or translated protein in a sample.

[0032] “Disorder” refers to cardiovascular conditions, diseases or syndromes including disorders of increased vascularization such as cancer including hemangioma and hemangioendothelioma, diabetic retinopathy, follicular cysts, Kaposi's sarcoma, endometriosis, obesity and peritoneal sclerosis; disorders of insufficient vascularization such as atherosclerosis and ulcers; and disorders of abnormal remodeling such as psoriasis.

[0033] An “expression profile” is a representation of gene expression in a sample. A nucleic acid expression profile is produced using sequencing, hybridization, or amplification (quantitative PCR) technologies and mRNAs or cDNAs from a sample. A protein expression profile, although time delayed, mirrors the nucleic acid expression profile and may use antibody or protein arrays, enzyme-linked immunosorbent assays, fluorescence-activated cell sorting, spatial immobilization such as 2D-PAGE in conjunction with a scintillation counter, mass spectrophotometry, or western analysis or affinity chromatography, to detect protein expression in a sample. The nucleic acids, proteins, or antibodies may be used in solution or attached to a substrate, and their detection is based on methods and labeling moieties well known in the art. Expression profiles may also be evaluated by methods such as electronic northern analysis, guilt-by-association, and transcript imaging. Expression profiles produced using any of the above methods may be contrasted with expression profiles produced using normal or diseased tissues. Of note is the correspondence between mRNA and protein expression has been discussed by Zweiger (2001, Transducing the Genome. McGraw-Hill, San Francisco, Calif.) and Glavas et al. (2001; T cell activation upregulates cyclic nucleotide phosphodiesterases 8A1 and 7A3, Proc Natl Acad Sci 98:6319-6342) among others.

[0034] “Fragment” refers to a chain of consecutive nucleotides from about 60 to about 5000 base pairs in length. Fragments may be used in PCR, hybridization or array technologies to identify related nucleic acids and in binding assays to screen for a ligand. Such ligands are useful as therapeutics to regulate replication, transcription or translation.

[0035] A “hybridization complex” is formed between a polynucleotide and a nucleic acid of a sample when the purines of one molecule hydrogen bond with the pyrimidines of the complementary molecule, e.g., 5′-A-G-T-C-3′ base pairs with 3′-T-C-A-G-5′. The degree of complementarity and the use of nucleotide analogs affect the efficiency and stringency of hybridization reactions.

[0036] “Identity” as applied to sequences, refers to the quantification (usually percentage) of nucleotide or residue matches between at least two sequences aligned using a standardized algorithm such as Smith-Waterman alignment (Smith and Waterman (1981) J Mol Biol 147:195-197), CLUSTALW (Thompson et al. (1994) Nucleic Acids Res 22:4673-4680), or BLAST2 (Altschul (1997) supra). BLAST2 may be used in a standardized and reproducible way to insert gaps in one of the sequences in order to optimize alignment and to achieve a more meaningful comparison between them. “Similarity” as applied to proteins uses the same algorithms but takes into account conservative substitutions of nucleotides or residues.

[0037] “Isolated” or “purified” refers to any molecule or compound that is separated from its natural environment and is from about 60% free to about 90% free from other components with which it is naturally associated.

[0038] “Labeling moiety” refers to any reporter molecule whether a visible or radioactive label, stain or dye that can be attached to or incorporated into a polynucleotide or protein. Visible labels and dyes include but are not limited to anthocyanins, β glucuronidase, BIODIPY, Coomassie blue, Cy3 and Cy5, digoxigenin, FITC, green fluorescent protein, luciferase, spyro red, silver, and the like. Radioactive markers include radioactive forms of hydrogen, iodine, phosphorous, sulfur, and the like.

[0039] “Ligand” refers to any agent, molecule, or compound which will bind specifically to a complementary site on a cDNA molecule or polynucleotide, or to an epitope or a protein. Such ligands stabilize or modulate the activity of polynucleotides or proteins and may be composed of inorganic or organic substances including nucleic acids, proteins, carbohydrates, fats, and lipids.

[0040] “Oligonucleotide” refers a single stranded molecule from about 18 to about 60 nucleotides in length which may be used in hybridization or amplification technologies or in regulation of replication, transcription or translation. Equivalent terms include amplimer, primer, and oligomer.

[0041] “Portion” refers to any part of a protein used for any purpose which retains at least one biological or antigenic characteristic of a native protein, but especially, to an epitope for the screening of ligands or for production of antibodies.

[0042] “Post-translational modification” of a protein can involve lipidation, glycosylation, phosphorylation, acetylation, racemization, proteolytic cleavage, and the like. These processes may occur synthetically or biochemically. Biochemical modifications will vary by cellular location, cell type, pH, enzymatic milieu, and the like.

[0043] “Probe” refers to a polynucleotide that hybridizes to at least one nucleic acid in a sample. Where targets are single stranded, probes are complementary single strands. Probes can be labeled for use in hybridization reactions including Southern, northern, in situ, dot blot, array, and like technologies or in screening assays.

[0044] “Protein” refers to a polypeptide or any portion thereof. An “oligopeptide” is an amino acid sequence from about five residues to about 15 residues that is used as part of a fusion protein to produce an antibody.

[0045] “Sample” is used in its broadest sense as containing nucleic acids, proteins, antibodies, and the like. A sample may comprise a bodily fluid; the soluble fraction of a cell preparation, or an aliquot of media in which cells were grown; a chromosome, an organelle, or membrane isolated or extracted from a cell; genomic DNA, RNA, or cDNA in solution or bound to a substrate; a cell; a tissue or tissue biopsy; a tissue print; buccal cells, skin, a hair or its follicle; and the like.

[0046] “Specific binding” refers to a special and precise interaction between two molecules which is dependent upon their structure, particularly their molecular side groups. For example, the intercalation of a regulatory protein into the major groove of a DNA molecule, the hydrogen bonding along the backbone between two single stranded nucleic acids, or the binding between an epitope of a protein and an agonist, antagonist, or antibody.

[0047] “Substrate” refers to any rigid or semi-rigid support to which polynucleotides or proteins are bound and includes membranes, filters, chips, slides, wafers, fibers, magnetic or nonmagnetic beads, gels, capillaries or other tubing, plates, polymers, and microparticles with a variety of surface forms including wells, trenches, pins, channels and pores.

[0048] A “transcript image” (TI) is a profile of gene transcription activity in a particular tissue at a particular time. TI provides assessment of the relative abundance of expressed polynucleotides in the cDNA libraries of an EST database as described in U.S. Pat. No. 5,840,484, incorporated herein by reference.

[0049] “Variant” refers to molecules that are recognized variations of a polynucleotide or a protein encoded by the polynucleotide. Splice variants may be determined by BLAST score, wherein the score is at least 100, and most preferably at least 400. Allelic variants have a high percent identity to the polynucleotides and may differ by about three bases per hundred bases. “Single nucleotide polymorphism” (SNP) refers to a change in a single base as a result of a substitution, insertion or deletion. The change may be conservative (purine for purine) or non-conservative (purine to pyrimidine) and may or may not result in a change in an encoded amino acid.

[0050] The Invention

[0051] The invention provides a combination comprising a plurality of polynucleotides, wherein each polynucleotide is differentially expressed in foam cells treated with LPS. The plurality of polynucleotides comprise the nucleic acid sequences of SEQ ID NOs:1-127, as presented in the Sequence Listing, or the complements of SEQ ID NOs:1-127. Additionally, the invention provides a subset of polynucleotides whose expression is upregulated, SEQ ID NOs:16-105 and 108-127 or downregulated, SEQ ID NOs:1-15 and 106-107, when foam cells are treated with oxidized low-density lipoprotein and LPS. The nucleotide sequences (SEQ ID NOs:1-127) were used to identify open reading frames within the sequences in the LIFESEQ databases (Incyte Genomics).

[0052] The invention also provides novel polypeptides comprising the amino acid sequences of SEQ ID NOs:154 and 155 encoded by polynucleotides having the nucleic acid sequences of SEQ ID NOs:51 and 54, respectively. The nucleic acid and amino acid sequences were queried against databases such as the LIFESEQ (Incyte), GenBank, and SwissProt databases using BLAST. Motifs, HMM algorithms, and alignments with BLOCKS, PRINTS, PROFILESCAN, Prosite, and PFAM databases were used to perform functional analyses; the antigenic index (Jameson-Wolf analysis) was determined using LASERGENE software (DNASTAR).

[0053] Translation of SEQ ID NO:51 using MACDNASIS PRO software (Hitachi Software Engineering) and default parameters is shown in FIGS. 1A-1C for the protein having the amino acid sequence of SEQ ID NO:154. Functional analysis identified a GATA-type zinc finger domain from residues C10 through T48, Ets-domain signature and profile from residues A20 through L67, fork head domain signature and profile from residues M1 through A76, MADS-box domain signature and profile from residues A20 through H78, (PROFILESCAN); an Ets-domain from residues H30 through G61, a Sigma-54 transcription factor family signature from residues K26 through 154, an zinc finger C2H2 type signature from residues C9 through H38 (BLIMPS); and a predicted transmembrane domain from residues S3 through H31 (TMAP). The oligopeptide portion of SEQ ID NO:154 from residues L23 through H31 is useful as an antigenic fragment.

[0054] Translation of SEQ ID NO:54 using MACDNASIS PRO software (Hitachi Software Engineering) and default parameters is shown in FIGS. 2A-2D for the protein having the amino acid sequence of SEQ ID NO:155. Functional analysis of SEQ ID NO:155 using BLOCKS, PRINTS, PROFILESCAN, Prosite, PFAM, Motifs, and HMM algorithms identified an Ets-domain signature and profile from M1 through L51, a MADS-box domain signature and profile from residues E2 through E47 (PROFILESCAN); and a predicted transmembrane domain from residues 4S through V20 (TMAP). The oligopeptide portion of SEQ ID NO:155 from residues K21 through V31 is useful as an antigenic fragment.

[0055] Method for Selecting Polynucleotides

[0056] Human THP-1 cells (American Type Culture Collection (ATCC), Manassas Va.) were grown in serum-containing medium and differentiated with 12-0-tetradecanoyl-phorbol-13-acetate (Research Biochemical International (RBI), Natick Mass.) for 24 hours. Cells were then cultured either in the presence or absence (control) of Ox-LDL for 3 days. The Ox-LDL pretreated and control cells were then activated by treatment with LPS. Poly(A) RNA from cultured cells was prepared for expression profiling after 0, 1, and 6 hours exposure to LPS. Poly(A) RNAs from experimental and control cells were labeled with Cy3 and Cy5 fluorescent dyes and hybridized in time-matched pairs on UNIGEM V 2.0 and HumanGenome GEMI arrays (Incyte Genomics, Palo Alto Calif.).

[0057] Agglomerative cluster analysis was used to identify response patterns and to establish relationships between different gene expression profiles. Each measurement was normalized by dividing the expression ratios by the maximum value for each time series. The clustering process defined a hierarchical tree with the number of branches intersecting at each branch level of the tree equal to the number of clusters at that level. Division of the tree at branch level 5 divides the 127 differentially expressed polynucleotides into 14 clusters.

[0058] Table 1 shows the differentially expressed gene transcripts and splice variants associated with foam cell development identified by cluster analysis. Column 1 shows the SEQ ID NO, column 2 shows the Incyte ID number, and column 3 shows the sequence annotation. Columns 4 through 10 show normalized differential expression based on the data converted from fold increase or decrease to log₂ such that an 2-fold increase reads “1.0” or a 2-fold decrease reads “−1.0”. LPS effects on transcription were determined in the control cells by comparing 1 hr and 6 hr RNA samples to time 0 levels (data designated: 1 h−/0− and 6 h−/0−; Table 1, columns 5 and 6, respectively). LPS effects on transcription in the OxLDL pre-treated cells were similarly determined (data designated: 1 hr+/0+ and 6 hr+/0+; Table 1, columns 7 and 8, respectively). OxLDL effects on LPS responsive genes were determined through matched time point comparisons of RNA from control and OxLDL pre-treated cells after LPS addition (data designated: 1 h+/1 h− and 6 h+/6 h−; Table 1, columns 9 and 10, respectively).

[0059] Table 2 shows a ID map for each polynucleotide and its encoded polypeptide. Column 1 shows the polynucleotide SEQ ID NO and column 2 shows the SEQ ID NO of the encoded polypeptide.

[0060] In particular, SEQ ID NOs:1-15 organize into co-expressing clusters with one another as shown by the shading patterns in Table 1. Similarly, SEQ ID NOs:16-17; SEQ ID NOs:18-25; SEQ ID NOs:26-38; SEQ ID NOs:39-63; SEQ ID NO:64; SEQ ID NOs:65-70; SEQ ID NOs:71-99; SEQ ID NOs:100-105; SEQ ID NOs:106; SEQ ID NOs:107-108; SEQ ID NOs:109-111; SEQ ID NOs:112-126; and SEQ ID NO:127 organize into thirteen co-expressing clusters as shown by the shading patterns in Table 1.

[0061] In particular, SEQ ID NO:51 (2303994CB1) co-expresses with sequences encoding chemokine receptors, cytokine receptors, and cytokine-inducible proteins. Therefore SEQ ID NO:51 is predicted to encode chemokine- or cytokine-inducible protein or an inflammation-related second messenger pathway protein. In particular, the polypeptide sequence of SEQ ID NO:154 is encoded by SEQ ID NO:51.

[0062] In particular, SEQ ID NO:52 (376673.3) co-expresses with sequences encoding chemokine receptors, cytokine receptors, and cytokine-inducible proteins. Therefore SEQ ID NO:52 is predicted to encode chemokine- or cytokine-inducible protein or an inflammation-related second messenger pathway protein.

[0063] In particular, SEQ ID NO:54 (1554082CB1) co-expresses with sequences encoding chemokine receptors, cytokine receptors, and cytokine-inducible proteins. Therefore SEQ ID NO:54 is predicted to encode chemokine- or cytokine-inducible protein or an inflammation-related second messenger pathway protein. In particular, the polypeptide sequence of SEQ ID NO:155 is encoded by SEQ ID NO:54.

[0064] In particular, SEQ ID NO:79 (234681.21) co-expresses with sequences encoding cytokine-inducible proteins, cytokine receptors, and cytokine-inducible transcription factors. Therefore SEQ ID NO:79 is predicted to encode cytokine-inducible protein or an inflammation-related second messenger pathway protein.

[0065] In particular, SEQ ID NO:85 (898547.1) co-expresses with sequences encoding cytokine-inducible proteins, cytokine receptors, and cytokine-inducible transcription factors. Therefore SEQ ID NO:85 is predicted to encode cytokine-inducible protein or an inflammation-related second messenger pathway protein.

[0066] In particular, SEQ ID NO:102 (1447015.4) co-expresses with sequences encoding transcription factors, nuclear receptors, and methyl-CpG binding proteins. Therefore SEQ ID NO:102 is predicted to encode a DNA-binding protein.

[0067] In particular, SEQ ID NO:119 (128475.1) co-expresses with sequences encoding the human tumor necrosis factor a inducible protein A20, transcription factors, cytokines, and protein tyrosine phosphatase proteins. Therefore SEQ ID NO:119 is predicted to encode cytokine protein or an inflammation-related second messenger pathway protein.

[0068] In particular, expression of SEQ ID NO:106 (277161.34) was downregulated at both 1 hour and 6 hours following LPS-treatment in both control and Ox-LDL-loaded cells. Therefore SEQ ID NO:106 is useful as a control nucleotide sequence in an analysis of foam cell inflammatory response, a specific utility.

[0069] In particular, SEQ ID NOs:4, 5, 6, 7, 8, 9, 12, 15, 17, 19, 21, 22, 23, 24, 25, 26, 27, 28, 30, 32, 33, 34, 35, 42, 45, 47, 51, 54, 55, 58, 61, 62, 74, 75, 76, 81, 83, 87, 88, 91, 92, 93, 94, 95, 96, 97, 100, 101, 107, 108, 111, 112, 114, 116, 120, 121, 123, 124, and 125 have open reading frames encoding polypeptide sequences. As shown in Table 2, the polynucleotides of SEQ ID NOs:4, 5, 6, 7, 8, 9, 12, 15, 17, 19, 21, 22, 23, 24, 25, 26, 27, 28, 30, 32, 33, 34, 35, 42, 45, 47, 51, 54, 55, 58, 61, 62, 74, 75, 76, 81, 83, 87, 88, 91, 92, 93, 94, 95, 96, 97, 100, 101, 107, 108, 111, 112, 114, 116, 120, 121, 123, 124, and 125, encode the polypeptides of SEQ ID NOs:128, 129, 130, 131, 132, 133, 134, 135, 136, 137, 138, 139, 140, 141, 142, 143, 144, 145, 146, 147, 148, 149, 150, 151, 152, 153, 154, 155, 156, 157, 158, 159, 160, 161, 162, 163, 164, 165, 166, 167, 168, 169, 170, 171, 172, 173, 174, 175, 176, 177, 178, 179, 180, 181, 182, 183, 184, 185, and 186, respectively.

[0070] The polynucleotides of the invention can be genomic DNA, cDNA, mRNA, or any RNA-like or DNA-like material such as peptide nucleic acids (PNA), branched DNAs and the like. Polynucleotide probes can be sense or antisense strand. Where targets are double stranded, probes may be either sense or antisense strands. Where targets are single stranded, probes are complementary single strands. In one embodiment, polynucleotides are cDNAs. In another embodiment, polynucleotides are plasmids. In the case of plasmids, the sequence of interest is the cDNA insert.

[0071] Polynucleotides can be prepared by a variety of synthetic or enzymatic methods well known in the art. Polynucleotides can be synthesized, in whole or in part, using chemical methods well known in the art (Caruthers et al. (1980) Nucleic Acids Symp Ser (7)215-233). Alternatively, polynucleotides can be produced enzymatically or recombinantly, by in vitro or in vivo transcription.

[0072] Nucleotide analogs can be incorporated into polynucleotide probes by methods well known in the art. The only requirement is that the incorporated nucleotide analogs of the probe must base pair with target nucleotides. For example, certain guanine nucleotides can be substituted with hypoxanthine which base pairs with cytosine residues. However, these base pairs are less stable than those between guanine and cytosine. Alternatively, adenine nucleotides can be substituted with 2,6-diaminopurine which can form stronger base pairs with thymidine than those between adenine and thymidine. Additionally, polynucleotides can include nucleotides that have been derivatized chemically or enzymatically. Typical chemical modifications include derivatization with acyl, alkyl, aryl or amino groups.

[0073] Polynucleotides can be synthesized on a substrate. Synthesis on the surface of a substrate may be accomplished using a chemical coupling procedure and a piezoelectric printing apparatus as described by Baldeschweiler et al. (PCT publication WO95/251116). Alternatively, the polynucleotides can be synthesized on a substrate surface using a self-addressable electronic device that controls when reagents are added as described by Heller et al. (U.S. Pat. No. 5,605,662; incorporated herein by reference).

[0074] The polynucleotide or the cDNA can be immobilized on a substrate by covalent means such as by chemical bonding procedures or UV irradiation. In one such method, a cDNA is bound to a glass surface which has been modified to contain epoxide or aldehyde groups. In another case, a probe is placed on a polylysine coated surface and then UV cross-linked as described by Shalon et al. (WO95/35505). In yet another method, a DNA is actively transported from a solution to a given position on a substrate by electrical means (Heller, supra). Alternatively, polynucleotides, clones, plasmids or cells can be arranged on a membrane or filter. In the latter case, cells are lysed, proteins and cellular components degraded, and the DNA is coupled to the membrane or filter by UV cross-linking.

[0075] Furthermore, polynucleotides do not have to be directly bound to the substrate, but rather can be bound to the substrate through a linker group. The linker groups are typically about 6 to 50 atoms long to provide exposure of the attached probe. Preferred linker groups include ethylene glycol oligomers, diamines, diacids and the like. Reactive groups on the substrate surface react with a terminal group of the linker to bind the linker to the substrate. The other terminus of the linker is then bound to the polynucleotide.

[0076] Polynucleotides can be attached to a substrate by sequentially dispensing reagents for probe synthesis on the substrate surface or by dispensing preformed DNA fragments to the substrate surface. Typical dispensers include a micropipette delivering solution to the substrate with a robotic system to control the position of the micropipette with respect to the substrate. There can be a multiplicity of dispensers delivering the reagents to their assigned reaction region on the array.

[0077] Use of the Polynucleotides

[0078] The polynucleotide of the invention may be used for a variety of purposes. For example, the combination of the invention may be used as elements on a microarray. The microarray can be used in high-throughput methods such as for detecting a related polynucleotide in a sample, screening libraries of molecules or compounds to identify a ligand, or diagnosing a particular cardiovascular condition, disease, or disorder and particularly atherosclerosis. Alternatively, a polynucleotide complementary to a given sequence of the sequence listing can be used to inhibit or inactivate a therapeutically relevant gene related to the polynucleotide.

[0079] When the combination of the invention is employed as elements on a microarray, the polynucleotide elements are organized in an ordered fashion so that each element is present at a specified location on the substrate. Because the elements are at specified locations on the substrate, the hybridization patterns and intensities, which together create a unique expression profile, can be interpreted in terms of expression levels of particular genes and can be correlated with a particular metabolic process, condition, disorder, disease, stage of disease, or treatment.

[0080] Hybridization

[0081] The polynucleotides or fragments or complements thereof of the invention may be used in various hybridization technologies. The polynucleotides may be naturally occurring, recombinant, or chemically synthesized; based on genomic or cDNA sequences; and labeled using a variety of reporter molecules by either PCR or enzymatic techniques. Commercial kits are available for labeling and cleanup of such polynucleotides or probes. Radioactive, fluorescent, and chemiluminescent labeling, are well known in the art. Alternatively, a polynucleotide is cloned into a commercially available vector, and probes are produced by transcription. The probe is synthesized and labeled by addition of an appropriate polymerase, such as T7 or SP6 polymerase, and at least one labeled nucleotide.

[0082] A probe may be designed or derived from unique regions of the polynucleotide, such as the 3′ untranslated region or from a conserved motif, and used in protocols to identify naturally occurring molecules encoding the same polypeptide, allelic variants, or related molecules. The probe may be DNA or RNA, is usually single stranded and should have at least 50% sequence identity to any of the nucleic acid sequences. The probe may comprise at least 18 contiguous nucleotides of a polynucleotide. Such a probe may be used under hybridization conditions that allow binding only to an identical sequence or under conditions that allow binding to a related sequence with at least one nucleotide substitution or deletion. Related sequences may be discovered using a pool of degenerate probes and appropriate hybridization conditions. Generally, a probe for use in Southern or northern hybridizations may be from about 400 to about 4000 nucleotides long. Such probes may be single-stranded or double-stranded and may have high binding specificity in solution-based or substrate-based hybridizations. A probe may also be an oligonucleotide that is used to detect a polynucleotide of the invention in a sample by PCR.

[0083] The stringency of hybridization is determined by G+C content of the probe, salt concentration, and temperature. In particular, stringency is increased by reducing the concentration of salt or raising the hybridization temperature. In solutions used for some membrane-based hybridizations, addition of an organic solvent such as formamide allows the reaction to occur at a lower temperature. Hybridization may be performed with buffers, such as 5×saline sodium citrate (SSC) with 1% sodium dodecyl sulfate (SDS) at 60° C., that permits the formation of a hybridization complex between nucleic acid sequences that contain some mismatches. Subsequent washes are performed with buffers such as 0.2×SSC with 0.1% SDS at either 45° C. (medium stringency) or 650-68° C. (high stringency). At high stringency, hybridization complexes will remain stable only where the polynucleotides are completely complementary. In some membrane-based hybridizations, preferably 35% or most preferably 50%, formamide may be added to the hybridization solution to reduce the temperature at which hybridization is performed. Background signals may be reduced by the use of detergents such as Sarkosyl or TRITON X-100 (Sigma-Aldrich, St. Louis Mo.) and a blocking agent such as denatured salmon sperm DNA. Selection of components and conditions for hybridization are well known to those skilled in the art and are reviewed in Ausubel et al. (1997, Short Protocols in Molecular Biology, John Wiley & Sons, New York N.Y., pp. 6.11-6.19, 14.11-14.36, and A1-43).

[0084] Dot-blot, slot-blot, low density and high density arrays are prepared and analyzed using methods known in the art. Probes or array elements from about 18 consecutive nucleotides to about 5000 consecutive nucleotides are contemplated by the invention and used in array technologies. The array may be used to monitor the expression level of large numbers of genes simultaneously and to identify genetic variants, mutations, and SNPs. Such information may be used to determine gene function; to understand the genetic basis of a disorder; to diagnose a disorder; and to develop and monitor the activities of therapeutic agents being used to control or cure a disorder. (See, e.g., U.S. Pat. No. 5,474,796; PCT application WO95/11995; PCT application WO95/35505; U.S. Pat. Nos. 5,605,662; and 5,958,342.)

[0085] Screening Assays

[0086] A polynucleotide may be used to screen a library or a plurality of molecules or compounds for a ligand with specific binding affinity. The ligands may be DNA molecules, peptides, proteins, and RNA molecules and include such molecules as transcription factors, enhancers, or repressors that regulate the activity, replication, transcription, or translation of the polynucleotide in the biological system. The assay involves combining the polynucleotide or a fragment thereof with the molecules or compounds under conditions that allow specific binding and detecting the bound polynucleotide to identify at least one ligand that specifically binds the polynucleotide.

[0087] In one embodiment, the polynucleotide of the invention may be incubated with a library of isolated and purified molecules or compounds and binding activity determined by methods well known in the art, e.g., a gel-retardation assay (U.S. Pat. No. 6,010,849) or a reticulocyte lysate transcriptional assay. In another embodiment, the polynucleotide may be incubated with nuclear extracts from biopsied and/or cultured cells and tissues. Specific binding between the polynucleotide and a molecule or compound in the nuclear extract is initially determined by gel shift assay and may be later confirmed by raising antibodies against that molecule or compound. When these antibodies are added into the assay, they cause a supershift in the gel-retardation assay.

[0088] In another embodiment, the polynucleotide may be used to purify a molecule or compound using affinity chromatography methods well known in the art. In one embodiment, the polynucleotide is chemically reacted with cyanogen bromide groups on a polymeric resin or gel. Then a sample is passed over and reacts with or binds to the polynucleotide. The molecule or compound which is bound to the polynucleotide may be released from the polynucleotide by increasing the salt concentration of the flow-through medium and collected.

[0089] Purification of Ligand

[0090] The polynucleotide or a fragment thereof may be used to purify a ligand from a sample. A method for using a mammalian polynucleotide or a fragment thereof to purify a ligand would involve combining the polynucleotide or a fragment thereof with a sample under conditions to allow specific binding, recovering the bound polynucleotide, and using an appropriate agent to separate the polynucleotide from the purified ligand.

[0091] Protein Production and Uses

[0092] The polynucleotides of this application or their full length cDNAs may be used to produce purified polypeptides using recombinant DNA technologies described herein and taught in Ausubel (supra; pp. 16.1-16.62). One of the advantages of producing polypeptides by these procedures is the ability to obtain highly-enriched sources of the polypeptides thereby simplifying purification procedures. The invention also encompasses amino acid substitutions, deletions or insertions made on the basis of similarity in polarity, charge, solubility, hydrophobicity, hydrophilicity, and/or the amphipathic nature of the residues involved. Such substitutions may be conservative in nature when the substituted residue has structural or chemical properties similar to the original residue (e.g., replacement of leucine with isoleucine or valine) or they may be nonconservative when the replacement residue is radically different (e.g., a glycine replaced by a tryptophan). Computer programs included in LASERGENE software (DNASTAR, Madison Wis.), MACVECTOR software (Genetics Computer Group, Madison Wis.) and RasMol software (University of Massachusetts, Amherst Mass.) may be used to help determine which and how many amino acid residues in a particular portion of the polypeptide may be substituted, inserted, or deleted without abolishing biological or immunological activity.

[0093] Expression of Encoded Proteins

[0094] Expression of a particular polynucleotide may be accomplished by cloning the polynucleotide into an appropriate vector and transforming this vector into an appropriate host cell. The cloning vector used for the construction of the human libraries may also be used for expression. Such vectors usually contain a promoter and a polylinker useful for cloning, priming, and transcription. An exemplary vector may also contain the promoter for β-galactosidase, an amino-terminal methionine and the subsequent seven amino acid residues of β-galactosidase. The vector may be transformed into an appropriate host strain of E. coli. Induction of the isolated bacterial strain with isopropylthiogalactoside (IPTG) using standard methods will produce a fusion protein that contains an N terminal methionine, the first seven residues of β-galactosidase, about 15 residues of linker, and the polypeptide encoded by the polynucleotide.

[0095] The polynucleotide may be shuttled into other vectors known to be useful for expression of protein in specific hosts. Oligonucleotides containing cloning sites and fragments of DNA sufficient to hybridize to stretches at both ends of the polynucleotide may be chemically synthesized by standard methods. These primers may then be used to amplify the desired fragments by PCR. The fragments may be digested with appropriate restriction enzymes under standard conditions and isolated using gel electrophoresis. Alternatively, similar fragments are produced by digestion of the polynucleotide with appropriate restriction enzymes and filled in with chemically synthesized oligonucleotides. Fragments of the coding sequence from more than one gene may be ligated together and expressed.

[0096] Signal sequences that dictate secretion of soluble proteins are particularly desirable as component parts of a recombinant sequence. For example, a chimeric protein may be expressed that includes one or more additional purification-facilitating domains. Such domains include, but are not limited to, metal-chelating domains that allow purification on immobilized metals, protein A domains that allow purification on immobilized immunoglobulin, and the domain utilized in the FLAGS extension/affinity purification system (Immunex, Seattle Wash.). The inclusion of a cleavable-linker sequence such as ENTEROKINASEMAX (Invitrogen, San Diego Calif.) between the polypeptide and the purification domain may also be used to recover the polypeptide.

[0097] Suitable expression hosts may include, but are not limited to, mammalian cells such as Chinese Hamster Ovary (CHO) and human 293 cells, insect cells such as Sf9 cells, yeast cells such as Saccharomyces cerevisiae, and bacteria such as E. coli. For each of these cell systems, a useful expression vector may also include an origin of replication and one or two selectable markers to allow selection in bacteria as well as in a transfected eukaryotic host. Vectors for use in eukaryotic expression hosts may require the addition of 3′ poly(A) tail if the polynucleotide lacks poly(A).

[0098] Additionally, the vector may contain promoters or enhancers that increase gene expression. Most promoters are host specific, and they include MMTV, SV40 or metallothionein promoters for CHO cells; trp, lac, tac or T7 promoters for bacterial hosts; or alpha factor, alcohol oxidase or PGH promoters for yeast. Adenoviral vectors with enhancers such as the rous sarcoma virus (RSV) enhancer or retroviral vectors with promoters such as the long terminal repeat (LTR) promoter may be used to drive protein expression in mammalian cell lines. Once homogeneous cultures of recombinant cells are obtained, large quantities of a secreted soluble polypeptide may be recovered from the conditioned medium and analyzed using chromatographic methods well known in the art. An alternative method for the production of large amounts of secreted protein involves the transformation of mammalian embryos and the recovery of the recombinant protein from milk produced by transgenic cows, goats, sheep, and the like.

[0099] In addition to recombinant production, polypeptides or portions thereof may be produced using solid-phase techniques (Stewart et al. (1969) Solid-Phase Peptide Synthesis, W H Freeman, San Francisco Calif.; Merrifield (1963) J Am Chem Soc 5:2149-2154), manually, or using machines such as the 431A Peptide synthesizer (Amersham Biosciences (APB), Piscataway N.J.). Polypeptides produced by any of the above methods may be used as pharmaceutical compositions to treat disorders associated with underexpression.

[0100] Screening Assays

[0101] A protein or a portion thereof encoded by the polynucleotide may be used to screen libraries or a plurality of molecules or compounds for a ligand with specific binding affinity or to purify a molecule or compound from a sample. The polypeptide or portion thereof employed in such screening may be free in solution, affixed to an abiotic or biotic substrate, or located intracellularly. For example, viable or fixed prokaryotic host cells that are stably transformed with recombinant nucleic acids that have expressed and positioned a polypeptide on their cell surface can be used in screening assays. The cells are screened against libraries or a plurality of ligands and the specificity of binding or formation of complexes between the expressed polypeptide and the ligand may be measured. The ligands may be DNA, RNA, or PNA molecules, agonists, antagonists, antibodies, immunoglobulins, inhibitors, peptides, pharmaceutical agents, proteins, drugs, or any other test molecule or compound that specifically binds the polypeptide. An exemplary assay involves combining the mammalian polypeptide or a portion thereof with the molecules or compounds under conditions that allow specific binding and detecting the bound polypeptide to identify at least one ligand that specifically binds the polypeptide.

[0102] This invention also contemplates the use of competitive drug screening assays in which neutralizing antibodies capable of binding the polypeptide specifically compete with a test compound capable of binding to the polypeptide or oligopeptide or fragment thereof. One method for high throughput screening using very small assay volumes and very small amounts of test compound is described in U.S. Pat. No. 5,876,946. Molecules or compounds identified by screening may be used in a mammalian model system to evaluate their toxicity, diagnostic, or therapeutic potential.

[0103] Purification of a Ligand

[0104] The polypeptide or a portion thereof may be used to purify a ligand from a sample. A method for using a mammalian polypeptide or a portion thereof to purify a ligand would involve combining the polypeptide or a portion thereof with a sample under conditions to allow specific binding, recovering the bound polypeptide, and using an appropriate chaotropic agent to separate the polypeptide from the purified ligand.

[0105] Production of Antibodies

[0106] A polypeptide encoded by a polynucleotide of the invention may be used to produce specific antibodies. Antibodies may be produced using an oligopeptide or a portion of the polypeptide with inherent immunological activity. Methods for producing antibodies include: 1) injecting an animal (usually goats, rabbits, or mice) with the polypeptide, or a portion or an oligopeptide thereof, to induce an immune response; 2) engineering hybridomas to produce monoclonal antibodies; 3) inducing in vivo production in the lymphocyte population; or 4) screening libraries of recombinant immunoglobulins. Recombinant immunoglobulins may be produced as taught in U.S. Pat. No. 4,816,567.

[0107] Antibodies produced using the polypeptides of the invention are useful for the diagnosis of prepathologic disorders as well as the diagnosis of chronic or acute diseases characterized by abnormalities in the expression, amount, or distribution of the polypeptide. A variety of protocols for competitive binding or immunoradiometric assays using either polyclonal or monoclonal antibodies specific for polypeptides are well known in the art. Immunoassays typically involve the formation of complexes between a polypeptide and its specific binding molecule or compound and the measurement of complex formation.

[0108] Immunoassay procedures may be used to quantify expression of the polypeptide in cell cultures, in subjects with a particular disorder or in model animal systems under various conditions. Increased or decreased production of polypeptides as monitored by immunoassay may contribute to knowledge of the cellular activities associated with developmental pathways, engineered conditions or diseases, or treatment efficacy. The quantity of a given polypeptide in a given tissue may be determined by performing immunoassays on freeze-thawed detergent extracts of biological samples and comparing the slope of the binding curves to binding curves generated by purified polypeptide.

[0109] Labeling of Molecules for Assay

[0110] A wide variety of reporter molecules and conjugation techniques are known by those skilled in the art and may be used in various polynucleotide, polypeptide or antibody arrays or assays. Synthesis of labeled molecules may be achieved using Promega (Madison Wis.) or APB kits for incorporation of a labeled nucleotide such as ³²P-dCTP, Cy3-dCTP or Cy5-dCTP or amino acid such as ³⁵S-methionine. Polynucleotides, polypeptides, or antibodies may be directly labeled with a reporter molecule by chemical conjugation to amines, thiols and other groups present in the molecules using reagents such as BIODIPY or FITC (Molecular Probes, Eugene Oreg.).

[0111] The polypeptides and antibodies may be labeled for purposes of assay by joining them, either covalently or noncovalently, with a reporter molecule that provides for a detectable signal. A wide variety of labels and conjugation techniques are known and have been reported in the scientific and patent literature including, but not limited to U.S. Pat. Nos. 3,817,837; 3,850,752; 3,939,350; 3,996,345; 4,277,437; 4,275,149; and 4,366,241.

[0112] Diagnostics

[0113] The polynucleotides, or fragments thereof, may be used to detect and quantify differential gene expression; absence, presence, or excess expression of mRNAs; or to monitor mRNA levels during therapeutic intervention. Cardiovascular disorders associated with differential expression particularly include atherosclerosis and associated complications. These polynucleotides can also be utilized as markers of treatment efficacy against the disorders noted above over a period ranging from several days to months. The diagnostic assay may use hybridization or amplification technology to compare gene expression in a biological sample from a patient to standard samples in order to detect differential gene expression. Methods for this comparison are elucidated herein and are well known in the art.

[0114] For example, the polynucleotide may be labeled by standard methods and added to a biological sample from a patient under conditions for the formation of hybridization complexes. After an incubation period, the sample is washed and the amount of label (or signal) associated with hybridization complexes, is quantified and compared with a standard value. If the amount of label in the patient sample is significantly altered in comparison to the standard value, then the presence of the disorder is indicated.

[0115] In order to provide a basis for the diagnosis of a condition, disease or disorder associated with gene expression, a normal or standard expression profile is established. This may be accomplished by combining a biological sample taken from normal subjects, either animal or human, with a probe under conditions for hybridization or amplification. Standard hybridization may be quantified by comparing the values obtained using normal subjects with values from an experiment in which a known amount of a purified target sequence is used. Standard values obtained in this manner may be compared with values obtained from samples from patients who are symptomatic for a particular condition, disease, or disorder. Deviation from standard values toward those associated with a particular condition is used to diagnose that condition.

[0116] Such assays may also be used to evaluate the efficacy of a particular therapeutic treatment regimen in animal studies and in clinical trial or to monitor the treatment of an individual patient. Once the presence of a condition is established and a treatment protocol is initiated, diagnostic assays may be repeated on a regular basis to determine if the level of expression in the patient begins to approximate that which is observed in a normal subject. The results obtained from successive assays may be used to show the efficacy of treatment.

[0117] Gene Expression Profiles

[0118] A gene expression profile comprises a plurality of polynucleotides and a plurality of detectable hybridization complexes, wherein each complex is formed by hybridization of one or more probes to one or more complementary sequences in a sample. The combination of the invention is used as elements on a microarray to analyze gene expression profiles. In one embodiment, the microarray is used to monitor the progression of disease. Researchers can assess and catalog the differences in gene expression between healthy and diseased tissues or cells. By analyzing changes in patterns of gene expression, disease can be diagnosed at earlier stages before the patient is symptomatic. The invention can be used to formulate a prognosis and to design a treatment regimen. The invention can also be used to monitor the efficacy of treatment. For treatments with known side effects, the microarray is employed to improve the treatment regimen. A dosage is established that causes a change in genetic expression patterns indicative of successful treatment. Expression patterns associated with the onset of undesirable side effects are avoided. This approach may be more sensitive and rapid than waiting for the patient to show inadequate improvement, or to manifest side effects, before altering the course of treatment.

[0119] In another embodiment, animal models which mimic a human disease can be used to characterize expression profiles associated with a particular condition, disorder or disease or treatment of the condition, disorder or disease. Novel treatment regimens may be tested in these animal models using microarrays to establish and then follow expression profiles over time. In addition, microarrays may be used with cell cultures or tissues removed from animal models to rapidly screen large numbers of candidate drug molecules, looking for ones that produce an expression profile similar to those of known therapeutic drugs, with the expectation that molecules with the same expression profile will likely have similar therapeutic effects. Thus, the invention provides the means to rapidly determine the molecular mode of action of a drug.

[0120] Assays Using Antibodies

[0121] Antibodies directed against epitopes on a protein encoded by a polynucleotide of the invention may be used in assays to quantify the amount of protein found in a particular human cell. Such assays include methods utilizing the antibody and a label to detect expression level under normal or disease conditions. The antibodies may be used with or without modification, and labeled by joining them, either covalently or noncovalently, with a labeling moiety.

[0122] Protocols for detecting and measuring protein expression using either polyclonal or monoclonal antibodies are well known in the art. Examples include ELISA, RIA, and fluorescent activated cell sorting (FACS). Such immunoassays typically involve the formation of complexes between the protein and its specific antibody and the measurement of such complexes. Preferred methods may employ a two-site, monoclonal-based immunoassay utilizing monoclonal antibodies reactive to two non-interfering epitopes or a competitive binding assay. (See, e.g., Coligan et al. (1997) Current Protocols in Immunology, Wiley-Interscience, New York N.Y.; Pound (1998) Immunochemical Protocols, Humana Press, Totowa N.J.).

[0123] Therapeutics

[0124] The polynucleotides of the invention can be used in gene therapy via delivery to a target tissue, such as mononuclear phagocytes. Expression of the protein encoded by the polynucleotide may correct a disorder associated with reduction or loss of endogenous target protein. Polynucleotides may be delivered to specific cells in vitro; and the transformed cells transferred in vivo to various tissues. Alternatively, polynucleotides may be delivered in vivo. Polynucleotides are delivered to cells or tissues using vectors such as retrovirus, adenovirus, adeno-associated virus, herpes simplex virus, and bacterial plasmids. Non-viral methods of gene delivery include cationic liposomes, polylysine conjugates, artificial viral envelopes, and direct injection of DNA (Anderson (1998) Nature 392:25-30; Dachs et al. (1997) Oncol Res 9:313-325; Chu et al. (1998) J Mol Med 76(3-4):184-192; August et al. (1997) Gene Therapy (Advances in Pharmacology Vol. 40), Academic Press, San Diego Calif.).

[0125] In addition, expression of a particular protein can be modulated through the specific binding of an antisense polynucleotide sequence to a nucleic acid sequence which either encodes the protein or directs its expression. The antisense polynucleotide can be DNA, RNA, branched or single-stranded nucleic acids with or with analog modifications. The nucleic acid sequence can be cellular mRNA and/or genomic DNA and binding of the antisense sequence can affect transcription and/or translation, respectively. Antisense sequences can be delivered intracellularly using viral vectors or non-viral vectors as described above or by Weiss et al. (1999; Cell Mol Life Sci 55(3):334-358) or Agrawal (1996; Antisense Therapeutics, Humana Press, Totowa N.J.).

[0126] Both polynucleotides and antisense sequences can be produced ex vivo by using any nucleic acid synthesizers or other automated systems known in the art. Polynucleotides and antisense sequences can also be produced biologically by transforming an appropriate host cell with an expression vector containing the sequence of interest.

[0127] Molecules which modulate the expression of a polynucleotide of the invention or activity of the encoded protein are useful as therapeutics for conditions and disorders associated with an immune response. Such molecules include agonists which increase the expression or activity of the polynucleotide or encoded protein, respectively; or antagonists which decrease expression or activity of the polynucleotide or encoded protein, respectively. In one aspect, an antibody which specifically binds the protein may be used directly as an antagonist or indirectly as a targeting or delivery mechanism for bringing a pharmaceutical agent to cells or tissues which express the protein.

[0128] Additionally, any of the proteins or their ligands, or complementary nucleic acid sequences may be administered in combination with other appropriate therapeutic agents. Selection of the appropriate agents for use in combination therapy may be made by one of ordinary skill in the art, according to conventional pharmaceutical principles. The combination of therapeutic agents may act synergistically to affect the treatment or prevention of the conditions and disorders associated with an immune response. Using this approach, one may be able to achieve therapeutic efficacy with lower dosages of each agent, thus reducing the potential for adverse side effects. Further, the therapeutic agents may be combined with pharmaceutically-acceptable carriers including excipients and auxiliaries which facilitate processing of the active compounds into preparations which can be used pharmaceutically. Further details on techniques for formulation and administration may be found in the latest edition of Remington's Pharmaceutical Sciences (Mack Publishing, Easton Pa.).

[0129] Model Systems

[0130] Animal models may be used as bioassays where they exhibit a phenotypic response similar to that of humans and where exposure conditions are relevant to human exposures. Mammals are the most common models, and most infectious agent, cancer, drug, and toxicity studies are performed on rodents such as rats or mice because of low cost, availability, lifespan, reproductive potential, and abundant reference literature. Inbred and outbred rodent strains provide a convenient model for investigation of the physiological consequences of underexpression or overexpression of genes of interest and for the development of methods for diagnosis and treatment of diseases. A mammal inbred to overexpress a particular gene (for example, secreted in milk) may also serve as a convenient source of the protein expressed by that gene.

[0131] Transgenic Animal Models

[0132] Transgenic rodents that overexpress or underexpress a gene of interest may be inbred and used to model human diseases or to test therapeutic or toxic agents. (See, e.g., U.S. Pat. Nos. 5,175,383 and 5,767,337.) In some cases, the introduced gene may be activated at a specific time in a specific tissue type during fetal or postnatal development. Expression of the transgene is monitored by analysis of phenotype, of tissue-specific mRNA expression, or of serum and tissue protein levels in transgenic animals before, during, and after challenge with experimental drug therapies.

[0133] Embryonic Stem Cells

[0134] Embryonic (ES) stem cells isolated from rodent embryos retain the potential to form embryonic tissues. When ES cells are placed inside a carrier embryo, they resume normal development and contribute to tissues of the live-born animal. ES cells are the preferred cells used in the creation of experimental knockout and knockin rodent strains. Mouse ES cells, such as the mouse 129/SvJ cell line, are derived from the early mouse embryo and are grown under culture conditions well known in the art. Vectors used to produce a transgenic strain contain a disease gene candidate and a marker gene, the latter serves to identify the presence of the introduced disease gene. The vector is transformed into ES cells by methods well known in the art, and transformed ES cells are identified and microinjected into mouse cell blastocysts such as those from the C57BL/6 mouse strain. The blastocysts are surgically transferred to pseudopregnant dams, and the resulting chimeric progeny are genotyped and bred to produce heterozygous or homozygous strains.

[0135] ES cells derived from human blastocysts may be manipulated in vitro to differentiate into at least eight separate cell lineages. These lineages are used to study the differentiation of various cell types and tissues in vitro, and they include endoderm, mesoderm, and ectodermal cell types that differentiate into, for example, neural cells, hematopoietic lineages, and cardiomyocytes.

[0136] Knockout Analysis

[0137] In gene knockout analysis, a region of a gene is enzymatically modified to include a non-natural intervening sequence such as the neomycin phosphotransferase gene (neo; Capecchi (1989) Science 244:1288-1292). The modified gene is transformed into cultured ES cells and integrates into the endogenous genome by homologous recombination. The inserted sequence disrupts transcription and translation of the endogenous gene. Transformed cells are injected into rodent blastulae, and the blastulae are implanted into pseudopregnant dams. Transgenic progeny are crossbred to obtain homozygous inbred lines that lack a functional copy of the mammalian gene.

[0138] Knockin Analysis

[0139] ES cells can be used to create knockin humanized animals (pigs) or transgenic animal models (mice or rats) of human diseases. With knockin technology, a region of a human gene is injected into animal ES cells, and the human sequence integrates into the animal cell genome. Transformed cells are injected into blastulae and the blastulae are implanted as described above. Transgenic progeny or inbred lines are studied and treated with potential pharmaceutical agents to obtain information on treatment of the analogous human condition. These methods have been used to model several human diseases.

[0140] As described herein, the uses of the polynucleotides, provided in the Sequence Listing of this application, and their encoded polypeptides are exemplary of known techniques and are not intended to reflect any limitation on their use in any technique that would be known to the person of average skill in the art. Furthermore, the polynucleotides provided in this application may be used in molecular biology techniques that have not yet been developed, provided the new techniques rely on properties of nucleotide sequences that are currently known to the person of ordinary skill in the art, e.g., the triplet genetic code, specific base pair interactions, and the like. Likewise, reference to a method may include combining more than one method for obtaining or assembling full length polynucleotides that will be known to those skilled in the art.

[0141] It is to be understood that the invention is not limited to the particular methodology, protocols, and reagents described, as these may vary. It is also understood that the terminology used herein is for the purpose of describing particular embodiments only and is not intended to limit the scope of the present invention which will be limited only by the appended claims. The examples below are provided to illustrate the subject invention and are not included for the purpose of limiting the invention.

### EXAMPLES

[0142] I. Construction of cDNA Libraries

[0143] RNA was purchased from Clontech Laboratories (Palo Alto Calif.) or isolated from various tissues. Some tissues were homogenized and lysed in guanidinium isothiocyanate, while others were homogenized and lysed in phenol or in a suitable mixture of denaturants, such as TRIZOL reagent (Invitrogen). The resulting lysates were centrifuged over CsCl cushions or extracted with chloroform. RNA was precipitated with either isopropanol or ethanol and sodium acetate, or by other routine methods.

[0144] Phenol extraction and precipitation of RNA were repeated as necessary to increase RNA purity. In most cases, RNA was treated with DNAse. For most libraries, poly(A) RNA was isolated using oligo d(T)-coupled paramagnetic particles (Promega), OLIGOTEX latex particles (Qiagen, Valencia Calif.), or an OLIGOTEX mRNA purification kit (Qiagen). Alternatively, poly(A) RNA was isolated directly from tissue lysates using other kits, including the POLY(A)PURE mRNA purification kit (Ambion, Austin Tex.).

[0145] In some cases, Stratagene (La Jolla, Calif.) was provided with RNA and constructed the corresponding cDNA libraries. Otherwise, cDNA was synthesized and cDNA libraries were constructed with the UNIZAP vector system (Stratagene) or SUPERSCRIPT plasmid system (Invitrogen) using the recommended procedures or similar methods known in the art. (See Ausubel, supra, Units 5.1-6.6.) Reverse transcription was initiated using oligo d(T) or random primers. Synthetic oligonucleotide adapters were ligated to double stranded cDNA, and the cDNA was digested with the appropriate-restriction enzyme or enzymes. For most libraries, the cDNA was size-selected (300-1000 bp) using SEPHACRYL S1000, SEPHAROSE CL2B, or SEPHAROSE CL4B column chromatography (APB) or preparative agarose gel electrophoresis. cDNAs were ligated into compatible restriction enzyme sites of the polylinker of the pBLUESCRIPT plasmid (Stratagene), pSPORT1 plasmid (Invitrogen), or pINCY plasmid (Incyte Genomics). Recombinant plasmids were transformed into XL1-Blue, XL1-BlueMRF, or SOLR competent E. coli cells (Stratagene) or DH5α, DH10B, or ELECTROMAX DH10B competent E. coli cells (Invitrogen).

[0146] In some cases, libraries were superinfected with a 5×excess of the helper phage, M13K07, according to the method of Vieira et al. (1987, Methods Enzymol 153:3-11) and normalized or subtracted using a methodology adapted from Soares (1994, Proc Natl Acad Sci 91:9228-9232), Swaroop et al. (1991, Nucl Acids Res 19:1954), and Bonaldo et al. (1996, Genome Res 6:791-806). The modified Soares normalization procedure was utilized to reduce the repetitive cloning of highly expressed high abundance cDNAs while maintaining the overall sequence complexity of the library. Modification included significantly longer hybridization times which allowed for increased gene discovery rates by biasing the normalized libraries toward those infrequently expressed low-abundance cDNAs which are poorly represented in a standard transcript image (Soares, supra).

[0147] II. Isolation and Sequencing of cDNA Clones

[0148] Plasmids were recovered from host cells by in vivo excision using the UNIZAP vector system (Stratagene) or by cell lysis. Plasmids were purified using one of the following: the Magic or WIZARD Minipreps DNA purification system (Promega); the AGTC Miniprep purification kit (Edge BioSystems, Gaithersburg Md.); the QIAWELL 8, QIAWELL 8 Plus, or QIAWELL 8 Ultra plasmid purification systems, or the REAL PREP 96 plasmid purification kit (Qiagen). Following precipitation, plasmids were resuspended in 0.1 ml of distilled water and stored, with or without lyophilization, at 4° C.

[0149] Alternatively, plasmid DNA was amplified from host cell lysates using direct link PCR in a high-throughput format (Rao (1994) Anal Biochem 216:1-14). Host cell lysis and thermal cycling steps were carried out in a single reaction mixture. Samples were processed and stored in 384-well plates, and the concentration of amplified plasmid DNA was quantified fluorometrically using PICOGREEN dye (Molecular Probes) and a FLUOROSKAN II fluorescence scanner (Labsystems Oy, Helsinki, Finland).

[0150] cDNA sequencing reactions were processed using standard methods or high-throughput instrumentation such as the CATALYST 800 thermal cycler (Applied Biosystems (ABI), Foster City Calif.) or the DNA ENGINE thermal cycler (MJ Research, Watertown Mass.) in conjunction with the HYDRA microdispenser (Robbins Scientific, Sunnyvale Calif.) or the MICROLAB 2200 system (Hamilton, Reno Nev.). cDNA sequencing reactions were prepared using reagents provided by APB or supplied in sequencing kits such as the PRISM BIGDYE cycle sequencing kit (ABI). Electrophoretic separation of cDNA sequencing reactions and detection of labeled polynucleotides were carried out using the MEGABACE 1000 DNA sequencing system (APB) or the PRISM 373 or 377 DNA sequencing systems (ABI) in conjunction with standard protocols, base calling software; and sequence analysis systems known in the art. Reading frames within the cDNA sequences were identified using standard methods (reviewed in Ausubel, supra, Unit 7.7).

[0151] III. Extension of cDNA Sequences

[0152] Nucleic acid sequences were extended using Incyte cDNA clones and oligonucleotide primers. One primer was synthesized to initiate 5′ extension of the known fragment, and the other, to initiate 3′ extension of the known fragment. The initial primers were designed using OLIGO software (Molecular Insights, Cascade, Colo.), or another appropriate program, to be about 22 to 30 nucleotides in length, to have a GC content of about 50% or more, and to anneal to the target sequence at temperatures of about 68° C. to about 72° C. Any stretch of nucleotides which would result in hairpin structures and primer-primer dimerizations was avoided.

[0153] Selected human cDNA libraries were used to extend the sequence. If more than one extension was necessary or desired, additional or nested sets of primers were designed. Preferred libraries are ones that have been size-selected to include larger cDNAs. Also, random primed libraries are preferred because they will contain more sequences with the 5′ and upstream regions of genes. A randomly primed library is particularly useful if an oligo d(T) library does not yield a full-length cDNA.

[0154] High fidelity amplification was obtained by PCR using methods well known in the art. PCR was performed in 96-well plates using the DNA ENGINE thermal cycler (MJ Research). The reaction mix contained DNA template, 200 mmol of each primer, reaction buffer containing Mg²⁺, (NH₄)₂SO₄, and β-mercaptoethanol, Taq DNA polymerase (APB), ELONGASE enzyme (Invitrogen), and Pfu DNA polymerase (Stratagene), with the following parameters for primer pair PCI A and PCI B (Incyte Genomics): Step 1: 94° C., 3 min; Step 2: 94° C., 15 sec; Step 3: 60° C., 1 min; Step 4: 68° C., 2 min; Step 5: Steps 2, 3, and 4 repeated 20 times; Step 6: 68° C., 5 min; Step 7: storage at 4° C. In the alternative, the parameters for primer pair T7 and SK+ (Stratagene) were as follows: Step 1: 94° C., 3 min; Step 2: 94° C., 15 sec; Step 3: 57° C., 1 min;

[0155] Step 4: 68° C., 2 min; Step 5: Steps 2, 3, and 4 repeated 20 times; Step 6: 68° C., 5 min; Step 7: storage at 4° C.

[0156] The concentration of DNA in each well was determined by dispensing 100 μl PICOGREEN reagent (0.25% reagent in 1×TE, v/v; Molecular Probes) and 0.5 μl of undiluted PCR product into each well of an opaque fluorimeter plate (Corning Life Sciences, Acton Mass.) and allowing the DNA to bind to the reagent. The plate was scanned in a Fluoroskan II (Labsystems Oy) to measure the fluorescence of the sample and to quantify the concentration of DNA. A 5 μl to 10 μl aliquot of the reaction mixture was analyzed by electrophoresis on a 1% agarose mini-gel to determine which reactions were successful in extending the sequence.

[0157] The extended nucleic acids were desalted and concentrated, transferred to 384-well plates, digested with CviJI cholera virus endonuclease (Molecular Biology Research, Madison Wis.), and sonicated or sheared prior to religation into pUC18 vector (APB). For shotgun sequencing, the digested nucleic acids were separated on low concentration (0.6 to 0.8%) agarose gels, fragments were excised, and agar digested with AGARACE enzyme (Promega). Extended clones were religated using T4 DNA ligase (New England Biolabs, Beverly Mass.) into pUC18 vector (APB), treated with Pfu DNA polymerase (Stratagene) to fill-in restriction site overhangs, and transfected into competent E. coli cells. Transformed cells were selected on antibiotic-containing media, and individual colonies were picked and cultured overnight at 37° C. in 384-well plates in LB/2×carbenicillin liquid media.

[0158] The cells were lysed, and DNA was amplified by PCR using Taq DNA polymerase (APB) and Pfu DNA polymerase (Stratagene) with the following parameters: Step 1: 94° C., 3 min; Step 2: 94° C., 15 sec; Step 3: 60° C., 1 min; Step 4: 72° C., 2 min; Step 5: steps 2, 3, and 4 repeated 29 times; Step 6: 72° C., 5 min; Step 7: storage at 4° C. DNA was quantified using PICOGREEN reagent (Molecular Probes) as described above. Samples with low DNA recoveries were reamplified using the same conditions described above. Samples were diluted with 20% dimethylsulfoxide (DMSO; 1:2, v/v), and sequenced using DYENAMIC energy transfer sequencing primers and the DYENAMIC DIRECT cycle sequencing kit (APB) or the PRISM BIGDYE terminator cycle sequencing kit (ABI).

[0159] IV. Assembly and Analysis of Sequences

[0160] The nucleic acid sequences of the polynucleotides presented in the Sequence Listing were prepared by automated methods and may contain occasional sequencing errors and unidentified nucleotides, designated with an N, that reflect state-of-the-art technology at the time the cDNA was sequenced. Vector, linker, and polyA sequences were masked using algorithms and programs based on BLAST, dynamic programming, and dinucleotide nearest neighbor analysis. Ns and SNPs can be verified either by resequencing the cDNA or using algorithms to compare multiple sequences that overlap the area in which the Ns or SNP occur. Both of these techniques are well known to and used by those skilled in the art. The sequences may be analyzed using a variety of algorithms described in Ausubel (1997, unit 7.7) and in Meyers (1995; Molecular Biology and Biotechnology, Wiley VCH, New York N.Y., pp. 856-853).

[0161] Component nucleotide sequences from chromatograms were subjected to PHRED analysis (Phil's Revised Editing Program; Phil Green, University of Washington, Seattle Wash.) and assigned a quality score. The sequences having at least a required quality score were subject to various pre-processing algorithms to eliminate low quality 3′ ends, vector and linker sequences, polyA tails, Alu repeats, mitochondrial and ribosomal sequences, bacterial contamination sequences, and sequences smaller than 50 base pairs. Sequences were screened using the BLOCK 2 program (Incyte Genomics), a motif analysis program based on sequence information contained in the SWISS-PROT and PROSITE databases (Bairoch et al. (1997) Nucleic Acids Res 25:217-221; Attwood et al. (1997) J Chem Inf Comput Sci. 37:417-424).

[0162] Processed sequences were subjected to assembly procedures in which the sequences were assigned to bins, one sequence per bin. Sequences in each bin were assembled to produce consensus sequences, templates. Subsequent new sequences were added to existing bins using the BLAST (Altschul, 1993, supra; Altschul, 1990, supra; Karlin et al. (1988) Proc Natl Acad Sci 85:841-845), BLASTn (v.1.4, WashU), and CROSSMATCH software (Green, supra). Candidate pairs were identified as all BLAST hits having a quality score greater than or equal to 150. Alignments of at least 82% local identity were accepted into the bin. The component sequences from each bin were assembled using PHRAP (Phil's Revised Alignment Program; Green, supra). Bins with several overlapping component sequences were assembled using DEEP PHRAP (Green, supra).

[0163] Bins were compared against each other, and those having local similarity of at least 82% were combined and reassembled. Reassembled bins having templates of insufficient overlap (less than 95% local identity) were re-split. Assembled templates were also subjected to analysis by STITCHER/EXON MAPPER algorithms which analyzed the probabilities of the presence of splice variants, alternatively spliced exons, splice junctions, differential expression of alternative spliced genes across tissue types, disease states, and the like. These resulting bins were subjected to several rounds of the above assembly procedures to generate the template sequences found in the LIFESEQ GOLD database (Incyte Genomics).

[0164] The assembled templates were annotated using the following procedure. Template sequences were analyzed using BLASTn (v2.0, NCBI) versus GBpri (GenBank version 109). “Hits” were defined as an exact match having from 95% local identity over 200 base pairs through 100% local identity over 100 base pairs, or a homolog match having an E-value of 1×10⁻⁸. The hits were subjected to frameshift FASTx versus GENPEPT (GenBank version 109). In this analysis, a homolog match was defined as having an E-value of 1×10⁻⁸. The assembly method used above was described in “Database and System for Storing, Comparing and Displaying Related Biomolecular Sequence Information”, U.S. Ser. No. 09/276,534, filed Mar. 25, 1999, incorporated by reference herein, and the LIFESEQ GOLD user manual (Incyte Genomics).

[0165] Following assembly, template sequences were subjected to motif, BLAST, Hidden Markov Model (HMM; Pearson and Lipman (1988) Proc Natl Acad Sci 85:2444-2448; Smith and Waterman (1981) J Mol Biol 147:195-197), and functional analyses, and categorized in protein hierarchies using methods described in “Database System Employing Protein Function Hierarchies for Viewing Biomolecular Sequence Data”, U.S. Ser. No. 08/812,290, filed Mar. 6, 1997; “Relational Database for Storing Biomolecule Information”, U.S. Ser. No. 08/947,845, filed Oct. 9, 1997; “Project-Based Full-Length Biomolecular Sequence Database” U.S. Pat. No. 5,953,727; and “Relational Database and System for Storing Information Relating to Biomolecular Sequences”, U.S. Ser. No. 09/034,807, filed Mar. 4, 1998, all of which are incorporated by reference herein. Template sequences may be further queried against public databases such as the GenBank rodent, mammalian, vertebrate, eukaryote, prokaryote, and human EST databases.

[0166] V. Preparation of Microarrays

[0167] The polynucleotides present on the human UNIGEM V 2.0 and the HumanGenome GEM-I arrays (Incyte Genomics) represent template sequences derived from the LIFESEQ GOLD assembled human sequence database (Incyte Genomics) based on a non-redundant set of gene-oriented clusters derived from IMAGE (integrated molecular analysis of genomes and their expression) cDNA library clones and derived ESTs in the gbEST database (National Center for Biotechnology Information, National Library of Medicine, Bethesda, Md.). A single clone representing each particular template was used on the microarray. Polynucleotides were amplified from bacterial cells using primers complementary to vector sequences flanking the cDNA insert. Thirty cycles of PCR increased the initial quantity of polynucleotide from 1-2 ng to a final quantity greater than 5 μg. Amplified polynucleotides were then purified using SEPHACRYL-400 columns (APB).

[0168] Purified polynucleotides were immobilized on polymer-coated glass slides. Glass microscope slides (Corning Life Sciences) were cleaned by ultrasound in 0.1% SDS and acetone, with extensive distilled water washes between and after treatments. Glass slides were etched in 4% hydrofluoric acid (VWR Scientific Products, West Chester Pa.), washed extensively in distilled water, and coated with 0.05% aminopropyl silane (Sigma-Aldrich, St. Louis Mo.) in 95% ethanol. Coated slides were cured in a 110° C. oven. polynucleotides were applied to the coated glass substrate using a procedure described in U.S. Pat. No. 5,807,522, incorporated herein by reference. One microliter of the polynucleotide at an average concentration of 100 ng/ul was loaded into the open capillary printing element by a high-speed robotic apparatus which then deposited about 5 nl of polynucleotide per slide.

[0169] Microarrays were UV-crosslinked using a STRATALINKER UV-crosslinker (Stratagene), and then washed at room temperature once in 0.2% SDS and three times in distilled water. Non-specific binding sites were blocked by incubation of microarrays in 0.2% casein in phosphate buffered saline (Tropix, Bedford Mass.) for 30 minutes at 60° C. followed by washes in 0.2% SDS and distilled water as before.

[0170] VI. Preparation of Target Polynucleotides

[0171] Human THP-1 cells (ATTC) were grown in RPMI 1640 medium containing 10% fetal serum (v/v), 0.45% glucose (w/v), 10 mM Hepes, 1 mM sodium pyruvate, 1×10⁻⁵ M β-mercaptoethanol, penicillin (100 units/ml) and streptomycin (100 mg/ml). For oxidized-LDL loading experiments, cells were seeded at a density of 1×10⁶ cells/ml in medium containing 12-0-tetradecanoyl-phorbol-13-acetate (RBI) at 1×10⁻⁷ M for 24 hr. The medium was then replaced by culture medium with or without 100 μg/ml of CUSO₄ “fully” oxidized LDL (Intracel, Rockville Md.) according to the method of Hammer et al. (1995; Arterio Thromb Vasc Biol 15:704-713). Medium was replaced every two days during the time of culture. Cells were treated with Ox-LDL for 3 days. During this period, cells remained adherent and had a speckled Nile red staining pattern.

[0172] The Ox-LDL pre-treated and untreated control cells were then activated by treatment with LPS. RNA from cultured cells was prepared for expression profiling after 0, 1, and 6 hours exposure to LPS.

[0173] Total RNA was extracted using the RNA STAT-60 kit (Tel-Test, Friendswood Tex.). Poly(A) RNA was purified using the POLYATRACT mRNA isolation system (Promega). Each poly(A) RNA sample was reverse transcribed using MMLV reverse-transcriptase, 0.05 pg/μl oligo-dT primer (21mer), 1×first strand buffer, 0.03 units/ul RNase inhibitor, 500 uM dATP, 500 uM dGTP, 500 uM dTTP, 40 uM dCTP, and 40 uM either dCTP-Cy3 or dCTP-Cy5 (APB). The reverse transcription reaction was performed in a 25 ml volume containing 200 ng poly(A) RNA using the GEMBRIGHT kit (Incyte Genomics). Specific control poly(A) RNAs (YCFR06, YCFR45, YCFR67, YCFR85, YCFR43, YCFR22, YCFR23, YCFR25, YCFR44, YCFR26) were synthesized by in vitro transcription from non-coding yeast genomic DNA (W. Lei, unpublished). As quantitative controls, control mRNAs (YCFR06, YCFR45, YCFR67, and YCFR85) at 0.002 ng, 0.02 ng, 0.2 ng, and 2 ng were diluted into reverse transcription reaction at ratios of 1:100,000, 1:10,000, 1:1000, 1:100 (w/w) to sample mRNA, respectively. To sample differential expression patterns, control mRNAs (YCFR43, YCFR22, YCFR23, YCFR25, YCFR44, YCFR26) were diluted into reverse transcription reaction at ratios of 1:3, 3:1, 1:10, 10:1, 1:25, 25:1 (w/w) to sample mRNA. Reactions were incubated at 37° C. for 2 hr, treated with 2.5 ml of 0.5M sodium hydroxide, and incubated for 20 minutes at 85° C. to the stop the reaction and degrade the RNA.

[0174] Probes were purified using two successive CHROMA SPIN 30 gel filtration spin columns (Clontech Laboratories). Cy3- and Cy5-labeled reaction samples were combined as described below and ethanol precipitated using 1 ml of glycogen (1 mg/ml), 60 ml sodium acetate, and 300 ml of 100% ethanol. The probe was then dried to completion using a SpeedVAC system (Savant Instruments, Holbrook N.Y.) and resuspended in 14 μl 5×SSC/0.2% SDS.

[0175] VII. Hybridization and Detection

[0176] Hybridization reactions contained 9 μl of probe mixture consisting of 0.2 μg each of Cy3 and Cy5 labeled cDNA synthesis products from pairs of matched time point experimental and control cells in 5×SSC, 0.2% SDS hybridization buffer. The target mixture was heated to 65° C. for 5 minutes and was aliquoted onto the microarray surface and covered with an 1.8 cm² coverslip. The microarrays were transferred to a waterproof chamber having a cavity just slightly larger than a microscope slide. The chamber was kept at 100% humidity internally by the addition of 140 μl of 5×SSC in a corner of the chamber. The chamber containing the microarrays was incubated for about 6.5 hours at 60° C. The microarrays were washed for 10 min at 45° C. in low stringency wash buffer (1×SSC, 0.1% SDS), three times for 10 minutes each at 45° C. in high stringency wash buffer (0.1×SSC), and dried.

[0177] Reporter-labeled hybridization complexes were detected with a microscope equipped with an Innova 70 mixed gas 0.10 W laser (Coherent, Santa Clara Calif.) capable of generating spectral lines at 488 nm for excitation of Cy3 and at 632 nm for excitation of Cy5. The excitation laser light was focused on the microarray using a 20×microscope objective (Nikon, Melville N.Y.). The slide containing the microarray was placed on a computer-controlled X-Y stage on the microscope and raster-scanned past the objective. The 1.8 cm×1.8 cm microarray used in the present example was scanned with a resolution of 20 micrometers.

[0178] In two separate scans, the mixed gas multiline laser excited the two fluorophores sequentially. Emitted light was split, based on wavelength, into two photomultiplier tube detectors (PMT R1477; Hamamatsu Photonics Systems, Bridgewater N.J.) corresponding to the two fluorophores. Appropriate filters positioned between the microarray and the photomultiplier tubes were used to filter the signals. The emission maxima of the fluorophores used were 565 nm for Cy3 and 650 nm for Cy5. Each microarray was typically scanned twice, one scan per fluorophore using the appropriate filters at the laser source, although the apparatus was capable of recording the spectra from both fluorophores simultaneously.

[0179] The sensitivity of the scans was calibrated using the signal intensity generated by a cDNA control species. Samples of the calibrating cDNA were separately labeled with the two fluorophores and identical amounts of each were added to the hybridization mixture. A specific location on the microarray contained a complementary DNA sequence, allowing the intensity of the signal at that location to be correlated with a weight ratio of hybridizing species of 1:100,000.

[0180] The output of the photomultiplier tube was digitized using a 12-bit RTI-835H analog-to-digital (A/D) conversion board (Analog Devices, Norwood, Mass.) installed in an IBM-compatible PC computer. The digitized data were displayed as an image where the signal intensity was mapped using a linear 20-color transformation to a pseudocolor scale ranging from blue (low signal) to red (high signal). The data was also analyzed quantitatively. Where two different fluorophores were excited and measured simultaneously, the data were first corrected for optical crosstalk (due to overlapping emission spectra) between the fluorophores using each fluorophore's emission spectrum.

[0181] A grid was superimposed over the fluorescence signal image such that the signal from each spot was centered in each element of the grid. The fluorescence signal within each element was then integrated to obtain a numerical value corresponding to the average intensity of the signal. The software used for signal analysis was the GEMTOOLS gene expression analysis program (Incyte Genomics).

[0182] VIII. Data Analysis and Results

[0183] An agglomerative cluster analysis was used to identify the typical response patterns and establish the relationships between the different gene expression profiles. Each gene measurement was first normalized by dividing the expression ratios by the maximum value for each time series. To emphasize the variation from one time point to the next, slopes were added to the expression vectors by taking the expression differences between consecutive time points. The Euclidean distance was used as a similarity measure for the expression responses.

[0184] The agglomerative algorithm employed constructs a dendrogram. Starting with N clusters each containing a single gene, at each step in the iteration the two closest clusters were merged into a larger cluster. The distance between clusters was defined as the distance between their average expression patterns. After N-1 steps, all the data points were merged together. The clustering process defines a hierarchical tree. Genes were automatically assigned to a cluster by cutting the tree between the root and each gene branch with a set of 10 lines (“branch levels”) separated by fixed distances. The branch level cut-off forms a cluster. The tree was first ‘normalized’ so that each branch was at the same distance from the root. In order to preserve the distance between the closest genes, the tree was distorted at the branch furthest from the leaf. The number of branches intersecting at each branch level of the tree equals the number of clusters at that level.

[0185] Division of the tree at branch level 5 divides the 127 differentially expressed polynucleotides into 14 clusters. In tables 1, columns 4 through 10 show the level of gene expression at each time point in response to Ox-LDL exposure vs. no Ox-LDL exposure.

[0186] The OxLDL pre-treated and control cells treated with LPS and RNA were harvested at 0, 1, and 6 hrs following addition of LPS to generate six unique samples. The effect of LPS on transcription of a number of sequences encoding known and unknown proteins and other expressed polynucleotide sequences were determined in the control cells by comparing 1 hr and 6 hr RNA samples to time 0 levels (data designated: 1 h−/0− and 6 h−/0−; Table 1, columns 5 and 6, respectively). LPS effects on transcription in the OxLDL pre-treated cells were similarly determined (data designated: 1 hr+/0+ and 6 hr+/0+; Table 1, columns 7 and 8, respectively). These procedures identified the total number of LPS regulated genes in these cells. LPS responsive genes were tabulated if they exhibited a 4-fold or greater change in message levels at either 1 or 6 hrs after LPS treatment. This cut-off was chosen to select only those genes most affected by LPS treatment.

[0187] The effects of OxLDL pre-treatment was determined through an additional set of hybridization experiments. In these experiments, matched time point comparisons were made between RNA from control and OxLDL pre-treated cells after addition of LPS (data designated: 1 h+/1 h− and 6 h+/6 h−; Table 1, columns 9 and 10, respectively). This second set of hybridizations to determine the OxLDL effects on LPS responsive genes was required because only comparisons between two mRNA populations hybridized to a single chip are valid using the GEM hybridization technology. Thus, LPS responsiveness was determined through the first set of hybridizations, and OxLDL effects were determined through the second set of hybridizations. Inspection of the data for LPS response in control and OxLDL pre-treated cells shows inter-chip comparative differences; for example, the 1 h−/0− vs. 1 hr+/0+values (Table 1, columns 5 and 7, respectively) were often highly concordant with the values observed in the single chip, matched time point measurements.

[0188] IX. Complementary Nucleic Acid Molecules

[0189] Molecules complementary to the polynucleotide, or a fragment thereof, are used to detect, decrease, or inhibit gene expression. Although use of oligonucleotides comprising from about 15 to about 30 base pairs is described, the same procedure is used with larger or smaller fragments or their derivatives e.g., PNAs). Oligonucleotides are selected using OLIGO software (Molecular Insights) and SEQ ID NOs:1-127. To inhibit transcription by preventing promoter binding, a complementary oligonucleotide is designed to bind to the most unique 5′ sequence, most preferably about 10 nucleotides before the initiation codon of the open reading frame. To inhibit translation, a complementary oligonucleotide is designed to prevent ribosomal binding to the mRNA encoding the protein.

[0190] In addition to using antisense molecules constructed to interrupt transcription or translation, modifications of gene expression can be obtained by designing antisense molecules to genomic sequences (such as enhancers or introns) or even to trans-acting regulatory genes. Similarly, antisense inhibition can be achieved using Hogeboom base-pairing methodology, also known as “triple helix” base pairing. Antisense molecules involved in triple helix pairing compromise the ability of the double helix to open sufficiently for the binding of polymerases, transcription factors, or regulatory molecules.

[0191] Such antisense molecules are placed in expression vectors and used to transform preferred cells or tissues. This may include introduction of the expression vector into a cell line to test efficacy; into an organ, tumor, synovial cavity, or the vascular system for transient or short term therapy; or into a stem cell or other reproducing lineage for long term or stable gene therapy. Transient expression may last for a month or more with a non-replicating vector and for three months or more if appropriate elements for inducing vector replication are used in the transformation/expression system.

[0192] Stable transformation of appropriate dividing cells with a vector encoding the antisense molecule can produce a transgenic cell line, tissue, or organism (U.S. Pat. No. 4,736,866). Those cells that assimilate and replicate sufficient quantities of the vector to allow stable integration also produce enough antisense molecules to compromise or entirely eliminate activity of the polynucleotide.

[0193] X. Hybridization Technologies and Analyses

[0194] Hybridization technology utilizes a variety of substrates such as polymer coated glass slides and nylon membranes. Arranging elements on polymer coated slides is described in Example V; probe preparation and hybridization and analysis using polymer coated slides is described in examples VI and VII, respectively.

[0195] Polynucleotides are applied to a membrane substrate by one of the following methods. A mixture of polynucleotides is fractionated by gel electrophoresis and transferred to a nylon membrane by capillary transfer. Alternatively, the polynucleotides are individually ligated to a vector and inserted into bacterial host cells to form a library. The polynucleotides are then arranged on a substrate by one of the following methods. In the first method, bacterial cells containing individual clones are robotically picked and arranged on a nylon membrane. The membrane is placed on LB agar containing selective agent (carbenicillin, kanamycin, ampicillin, or chloramphenicol depending on the vector used) and incubated at 37° C. for 16 hr. The membrane is removed from the agar and consecutively placed colony side up in 10% SDS, denaturing solution (1.5 M NaCl, 0.5 M NaOH), neutralizing solution (1.5 M NaCl, 1 M Tris, pH 8.0), and twice in 2×SSC for 10 min each. The membrane is then UV irradiated in a STRATALINKER UV-crosslinker (Stratagene).

[0196] In the second method, polynucleotides are amplified from bacterial vectors by thirty cycles of PCR using primers complementary to vector sequences flanking the insert. PCR amplification increases a starting concentration of 1-2 ng nucleic acid to a final quantity greater than 5 μg. Amplified nucleic acids from about 400 bp to about 5000 bp in length are purified using SEPHACRYL-400 beads (APB). Purified nucleic acids are arranged on a nylon membrane manually or using a dot/slot blotting manifold and suction device and are immobilized by denaturation, neutralization, and UV irradiation as described above.

[0197] Hybridization probes derived from polynucleotides of the Sequence Listing are employed for screening cDNAs, mRNAs, or genomic DNA in membrane-based hybridizations. Probes are prepared by diluting the polynucleotides to a concentration of 40-50 ng in 45 μl TE buffer, denaturing by heating to 100° C. for five min, and briefly centrifuging. The denatured polynucleotide is then added to a REDIPRIME tube (APB), gently mixed until blue color is evenly distributed, and briefly centrifuged. Five microliters of [³²P]dCTP is added to the tube, and the contents are incubated at 37° C. for 10 min. The labeling reaction is stopped by adding 5 μl of 0.2M EDTA, and probe is purified from unincorporated nucleotides using a PROBEQUANT G-50 microcolumn (APB). The purified probe is heated to 100° C. for five min, snap cooled for two min on ice.

[0198] Membranes are pre-hybridized in hybridization solution containing 1% Sarkosyl and 1×high phosphate buffer (0.5 M NaCl, 0.1 M Na₂HPO₄, 5 mM EDTA, pH 7) at 55° C. for two hr. The probe, diluted in 15 ml fresh hybridization solution, is then added to the membrane. The membrane is hybridized with the probe at 55° C. for 16 hr. Following hybridization, the membrane is washed for 15 min at 25° C. in 1 mM Tris (pH 8.0), 1% Sarkosyl, and four times for 15 min each at 25° C. in 1 mM Tris (pH 8.0). To detect hybridization complexes, XOMAT-AR film (Eastman Kodak, Rochester N.Y.) is exposed to the membrane overnight at −70° C., developed, and examined.

[0199] XI. Expression of the Encoded Protein

[0200] Expression and purification of a protein encoded by a polynucleotide of the invention is achieved using bacterial or virus-based expression systems. For expression in bacteria, the polynucleotide is subcloned into a vector containing an antibiotic resistance gene and an inducible promoter that directs high levels of transcription. Examples of such promoters include, but are not limited to, the trp-lac (tac) hybrid promoter and the T5 or T7 bacteriophage promoter in conjunction with the lac operator regulatory element. Recombinant vectors are transformed into bacterial hosts, such as BL21(DE3). Antibiotic resistant bacteria express the protein upon induction with isopropyl beta-D-thiogalactopyranoside (IPTG). Expression in eukaryotic cells is achieved by infecting Spodoptera frugiperda (Sf9) insect cells with recombinant baculovirus, Autographica californica nuclear polyhedrosis virus. The polyhedrin gene of baculovirus is replaced with the polynucleotide by either homologous recombination or bacterial-mediated transposition involving transfer plasmid intermediates. Viral infectivity is maintained and the strong polyhedrin promoter drives high levels of polynucleotide transcription.

[0201] For ease of purification, the protein is synthesized as a fusion protein with glutathione-S-transferase (GST; APB) or a similar alternative such as FLAG. The fusion protein is purified on immobilized glutathione under conditions that maintain protein activity and antigenicity. After purification, the GST moiety is proteolytically cleaved from the protein with thrombin. A fusion protein with FLAG, an 8-amino acid peptide, is purified using commercially available monoclonal and polyclonal anti-FLAG antibodies (Eastman Kodak, Rochester N.Y.).

[0202] XII. Production of Specific Antibodies

[0203] A denatured polypeptide from a reverse phase HPLC separation is obtained in quantities up to 75 mg. This denatured protein is used to immunize mice or rabbits following standard protocols. About 100 μg is used to immunize a mouse, while up to 1 mg is used to immunize a rabbit. The denatured polypeptide is radioiodinated and incubated with murine B-cell hybridomas to screen for monoclonal antibodies. About 20 mg of polypeptide is sufficient for labeling and screening several thousand clones.

[0204] In another approach, the amino acid sequence translated from a polynucleotide of the invention is analyzed using PROTEAN software (DNASTAR) to determine regions of high immunogenicity. The optimal sequences for immunization are usually at the C-terminus, the N-terminus, and those intervening, hydrophilic regions of the polypeptide that are likely to be exposed to the external environment when the polypeptide is in its natural conformation. Typically, oligopeptides about 15 residues in length are synthesized using an 431 Peptide synthesizer (ABI) using Fmoc-chemistry and then coupled to keyhole limpet hemocyanin (KLH; Sigma Aldrich) by reaction with M-maleimidobenzoyl-N-hydroxysuccinimide ester. If necessary, a cysteine may be introduced at the N-terminus of the peptide to permit coupling to KLH. Rabbits are immunized with the oligopeptide-KLH complex in complete Freund's adjuvant. The resulting antisera are tested for antipeptide activity by binding the peptide to plastic, blocking with 1% BSA, reacting with rabbit antisera, washing, and reacting with radioiodinated goat anti-rabbit IgG.

[0205] Hybridomas are prepared and screened using standard techniques. Hybridomas of interest are detected by screening with radioiodinated polypeptide to identify those fusions producing a monoclonal antibody specific for the polypeptide. In a typical protocol, wells of 96 well plates (BD Biosciences, San Jose Calif.) are coated with affinity-purified, specific rabbit-anti-mouse (or suitable anti-species Ig) antibodies at 10 mg/ml. The coated wells are blocked with 1% BSA and washed and exposed to supernatants from hybridomas. After incubation, the wells are exposed to radiolabeled polypeptide at 1 mg/ml. Clones producing antibodies bind a quantity of labeled polypeptide that is detectable above background.

[0206] Such clones are expanded and subjected to 2 cycles of cloning at 1 cell/3 wells. Cloned hybridomas are injected into pristane-treated mice to produce ascites, and monoclonal antibody is purified from the ascitic fluid by affinity chromatography on protein A (APB). Monoclonal antibodies with affinities of at least 10⁸ M⁻¹, preferably 10⁹ to 10¹⁰ M⁻¹ or stronger, are made by procedures well known in the art.

[0207] XIII. Purification of Naturally Occurring Protein Using Specific Antibodies

[0208] Naturally occurring or recombinant protein is purified by immunoaffinity chromatography using antibodies specific for the protein. An immunoaffinity column is constructed by covalently coupling the antibody to CNBr-activated SEPHAROSE resin (APB). Media containing the protein is passed over the immunoaffinity column, and the column is washed using high ionic strength buffers in the presence of detergent to allow preferential absorbance of the protein. After coupling, the protein is eluted from the column using a buffer of pH 2-3 or a high concentration of urea or thiocyanate ion to disrupt antibody/protein binding, and the protein is collected.

[0209] XIV. Screening Molecules for Specific Binding

[0210] The polynucleotide or fragments thereof are labeled with ³²P-dCTP, Cy3-dCTP, Cy5-dCTP (APB), or the protein or portions thereof are labeled with BIODIPY or FITC (Molecular Probes). A library or a plurality of candidate molecules or compounds previously arranged on a substrate are incubated in the presence of labeled polynucleotide or protein. After incubation under conditions for a polynucleotide or protein, the substrate is washed. Any position on the substrate retaining label, that indicates specific binding or complex formation, identifies a ligand. Data obtained using different concentrations of the polynucleotide or polypeptide are used to calculate affinity between the labeled polynucleotide or protein and the bound ligand.

[0211] All publications and patents mentioned in the above specification are herein incorporated by reference. Various modifications and variations of the described method and system of the invention will be apparent to those skilled in the art without departing from the scope and spirit of the invention. Although the invention has been described in connection with specific preferred embodiments, it should be understood that the invention as claimed should not be unduly limited to such specific embodiments. Indeed, various modifications of the above-described modes for carrying out the invention which are obvious to those skilled in the field of molecular biology or related fields are intended to be within the scope of the following claims.

TABLE 1

| SEQ ID NO | Incyte ID | Sequence Annotation | [chemical structure] |
|---|---|---|---|
| 1 | 460023.9 | Human calmodulin (CALM2) gene, exons 3-6, and complete cds | [chemical structure] |
| 2 | 1004532.45 | Human mRNA for KIAA0930 protein, partial cds. | [chemical structure] |
| 3 | 1383324.156 | Human mRNA for beta-adrenergic receptor kinase. | [chemical structure] |
| 4 | 1400053CB1 | leukotriene A4 hydrolase | [chemical structure] |
| 5 | 2874030CB1 | Human differentiation antigen (CD33) mRNA, complete cds. | [chemical structure] |
| 6 | 2049950CB1 | glutamate-cysteine ligase (gamma-glutamylcysteine synthetase), catalytic (72.8kD) | [chemical structure] |
| 7 | 3257507CB1 | ref-1 = redox factor [Human, mRNA, 1441 nt]. | [chemical structure] |
| | | Human TTG-2 mRNA for a cysteine rich protein with LIM motif. | [chemical structure] |
| 8 | 2676869CB1 | Human CGI-142 protein mRNA, complete cds. | [chemical structure] |
| 9 | 672615CB1 | Human microsomal glutathione S-transferase 2 (MGST2) mRNA, complete cds. | [chemical structure] |
| | | Human H-cadherin mRNA, complete cds. | [chemical structure] |
| | | Human adenylyl cyclase-associated protein (CAP) mRNA, complete cds. | [chemical structure] |
| 10 | 1385861.1 | Human G-protein-coupled receptor V28 mRNA, complete cds. | [chemical structure] |
| 11 | 1383798.8 | embigin protein | [chemical structure] |
| | | macrophage inhibitory cytokine-1 | [chemical structure] |
| | | Human cellular proto-oncogene (c-mer) mRNA, complete cds. | [chemical structure] |
| 12 | 2616727CB1 | LIM and SH3 protein 1 (MLN50) | [chemical structure] |
| | | Human (HeLa) small nuclear U5 A RNA. | [chemical structure] |
| 13 | 251906.2 | Human CCAAT/enhancer binding protein alpha gene, complete cds. | [chemical structure] |
| 14 | 166400.36 | Human K+ channel beta 2 subunit mRNA, complete cds. | [chemical structure] |
| 15 | 1354395CB1 | RhoGAP | [chemical structure] |
| | | Human p55CDC mRNA, complete cds. | [chemical structure] |
| | | Human insulin induced protein 1 (INSIG1) gene, complete cds. | [chemical structure] |
| | | insulin induced gene 1 | [chemical structure] |
| | | Human chemokine (hmrp-2a) mRNA, complete cds. | [chemical structure] |
| | | gene predicted from cDNA with a complete coding sequence | [chemical structure] |
| | | Human mRNA; cDNA DKFZp586N041 (from clone DKFZp586N041). | [chemical structure] |
| 16 | 253541.1 | Human protein tyrosine phosphatase mRNA, complete cds. | [chemical structure] |
| | | Human plasma membrane calcium ATPase isoform 1 (ATP2B1) gene | [chemical structure] |
| 17 | 1966280CB1 | Human mRNA for pentaxin (PTX3). | [chemical structure] |
| | | Human plasma membrane calcium ATPase isoform 1 (ATP2B1) gene | [chemical structure] |
| | | Nijmegen breakage syndrome 1 (nibrin) | [chemical structure] |
| | | SWI/SNF related, matrix associated, actin dependent regulator of chromatin, subfamily a, member 5 | [chemical structure] |
| 18 | 1399416.4 | ESTs | [chemical structure] |
| 19 | 1250434CB1 | hypoxia-inducible factor 1, alpha subunit (basic helix-loop-helix transcription factor) | [chemical structure] |
| 20 | 1377369.2 | spermidine/spermine N1-acetyltransferase | [chemical structure] |
| 21 | 342012CB1 | B-cell translocation gene 1, anti-proliferative | [chemical structure] |
| 22 | 1438184CB1 | nuclear factor of kappa light polypeptide gene enhancer in B-cells 1 (p105) | [chemical structure] |
| 23 | 1450758CB1 | Human MRS1 mRNA, complete cds. | [chemical structure] |
| 24 | 1841778CB1 | Human mRNA for interleukin-1 receptor antagonist. | [chemical structure] |
| 25 | 2814863CB1 | pre-B-cell colony-enhancing factor | [chemical structure] |
| | | fatty-acid-Coenzyme A ligase, long-chain 1 | [chemical structure] |
| 26 | 1218366CB1 | pleckstrin | [chemical structure] |
| | | Human G0S2 protein gene, complete cds | [chemical structure] |
| 27 | 2483854CB1 | interleukin 1, alpha | [chemical structure] |
| | | Human mRNA for pleckstrin (P47). | [chemical structure] |
| 28 | 1842870CB1 | myeloid cell leukemia sequence 1 (BCL2-related) | [chemical structure] |
| 29 | 235631.1 | dual specificity phosphatase 2 | [chemical structure] |
| 30 | 156986CB1 | melibiose carrier protein | [chemical structure] |
| 31 | 1136056.2 | Human G0S3 mRNA, complete cds. | [chemical structure] |
| 32 | 3732868CB1 | Human G0S2 gene, 5′ flank and cds. | [chemical structure] |
| | | Human mRNA for interleukin-1 precursor (pre IL-1). | [chemical structure] |
| 33 | 1528186CB1 | Human TRAF-interacting protein I-TRAF mRNA, complete cds. | [chemical structure] |
| 34 | 1453334CB1 | plasminogen activator, urokinase | [chemical structure] |
| 35 | 779175CB1 | FOS-like antigen 2 | [chemical structure] |
| 36 | 246574.3 | Human gro (growth regulated) gene. | [chemical structure] |
| | | Human protein tyrosine phosphatase (PAC-1) mRNA, complete cds. | [chemical structure] |
| 37 | 227742.4 | ESTs | [chemical structure] |
| | | small inducible cytokine subfamily A (Cys-Cys), memb 18, pulmonary and activation-regulated | [chemical structure] |
| | | small inducible cytokine subfamily A (Cys-Cys), memb 18, pulmonary and activation-regulated | [chemical structure] |
| 38 | 337792.2 | phorbol-12-myristate-13-acetate-induced protein 1 | [chemical structure] |
| | | KIAA0212 gene product | [chemical structure] |
| 39 | 57385.565 | Human EBV induced G-protein coupled receptor (EBI2) mRNA, complete cds. | [chemical structure] |
| 40 | 331150.1 | interleukin 10 receptor, alpha | [chemical structure] |
| 41 | 989010.6 | Human monocyte chemotactic protein gene, complete cds. | [chemical structure] |
| | | CD44 | [chemical structure] |
| 42 | 3072333CB1 | insulin-like growth factor binding protein 3 | [chemical structure] |
| 43 | 247025.3 | chemokine (C-C motif) receptor 7 | [chemical structure] |
| 44 | 229299.3 | small inducible cytokine subfamily B (Cys-X-Cys), member 11 | [chemical structure] |
| 45 | 1452055CB1 | tumor necrosis factor receptor superfamily, member 5 | [chemical structure] |
| 46 | 410442.8 | Human ETS oncogene (PEP1) mRNA, complete cds. | [chemical structure] |
| 47 | 1518310CB1 | Human connexin 26 (GJB2) mRNA, complete cds. | [chemical structure] |
| 48 | 405646.17 | tumor necrosis factor receptor superfamily, member 5 | [chemical structure] |
| | | Human interferon-induced cellular resistance mediator protein (MxB) mRNA, complete cds. | [chemical structure] |
| 49 | 1136376.164 | Human mRNA for 80K-L protein, complete cds. | [chemical structure] |
| 50 | 233104.1 | ESTs | [chemical structure] |
| 51 | 2303994CB1 | Mpc1 locus, uterus and prostate cancer-associated | [chemical structure] |
| | | Incyte EST | [chemical structure] |
| | | Human lyn mRNA encoding a tyrosine kinase. | [chemical structure] |
| 52 | 376673.3 | IFN-induced polynucleotide | [chemical structure] |
| 53 | 346511.1 | 2′-5′oligoadenylate synthetase 2 | [chemical structure] |
| | | Human interferon-induced cellular resistance mediator protein (MxA) mRNA, complete cds. | [chemical structure] |
| 54 | 1554082CB1 | GRAIL | [chemical structure] |
| 55 | 5185743CB1 | Human tonicity-responsive enhancer-binding protein mRNA, complete cds. | [chemical structure] |
| 56 | 899263.12 | KIAA0032 | [chemical structure] |
| | | Human (2′-5′) oligo A synthetase E gene, exon 7 and flanks. | [chemical structure] |
| 57 | 218602.1 | ubiquitin specific protease UBP43 | [chemical structure] |
| 58 | 4436929CB1 | Human HPK/GCK-like kinase HGK mRNA, complete cds. | [chemical structure] |
| 59 | 222981.14 | Human proto-oncogene (BCL3) gene, exons 3-9 and complete cds. | [chemical structure] |
| | | ring finger protein | [chemical structure] |
| 60 | 1453496.9 | Human transcription factor ISGF-3 mRNA, complete cds. | [chemical structure] |
| 61 | 020293CB1 | Human B lymphocyte chemoattractant BLC mRNA, complete cds. | [chemical structure] |
| | | small inducible cytokine subfamily B (Cys-X-Cys), memb 5 (epithelial-derived neutrophil-activating peptide 78) | [chemical structure] |
| 62 | 135626CB1 | Human phorbolin-1-related protein mRNA, complete cds. | [chemical structure] |
| 63 | 244262.2 | small inducible cytokine subfamily B (Cys-X-Cys), memb 6 (granulocyte chemotactic protein 2) | [chemical structure] |
| | | Human myeloid cell differentiation protein (MCL1) mRNA. | [chemical structure] |
| | | Human endoperoxide synthase type II mRNA, complete cds. | [chemical structure] |
| 64 | 1330247.162 | Human rhoB gene mRNA. | [chemical structure] |
| 65 | 1377892.2 | regulator of G-protein signalling 2, 24kD | [chemical structure] |
| 66 | 1446506.1 | MAIL nuclear I kappa B protein | [chemical structure] |
| 67 | 53959.1 | Human zinc finger transcriptional regulator mRNA, complete cds. | [chemical structure] |
| 68 | 223092.1 | tumor necrosis factor (TNF superfamily, member 2) | [chemical structure] |
| | | GTP-binding protein overexpressed in skeletal muscle | [chemical structure] |
| 69 | 335430.4 | Human mRNA for leucine-rich primary response protein 1. | [chemical structure] |
| | | Human Gem GTPase (gem) mRNA, complete cds. | [chemical structure] |
| 70 | 1398075.7 | Jun activation domain binding protein | [chemical structure] |
| | | Human activating transcription factor 3 (ATF3) mRNA, complete cds. | [chemical structure] |
| 71 | 1453496.8 | Homo sapiens transcription factor ISGF-3 mRNA, complete cds | [chemical structure] |
| | | Human transcription factor ISGF-3 mRNA, complete cds. | [chemical structure] |
| | | aquaporin 9 | [chemical structure] |
| | | Human neutrophil oxidase factor (p67-phox) mRNA, complete cds. | [chemical structure] |
| 72 | 1327351.406 | Human cell adhesion molecule (CD44) mRNA, complete cds. | [chemical structure] |
| 73 | 200578.1 | ESTs | [chemical structure] |
| 74 | 2835028CB1 | interleukin 7 receptor | [chemical structure] |
| | | Fig-1 protein | [chemical structure] |
| 75 | 2875023CB1 | kynureninase (L-kynurenine hydrolase) | [chemical structure] |
| 76 | 3173735CB1 | guanylate binding protein 1, interferon-inducible, 67kD | [chemical structure] |
| 77 | 474301.1 | Human mRNA for KIAA0942 protein, partial cds. | [chemical structure] |
| 78 | 406992.1 | cystine/glutamate transporter | [chemical structure] |
| | | CD44 antigen (homing function and Indian blood group system) | [chemical structure] |
| 79 | 234681.21 | cardiac/skeletal muscle M5-14 | [chemical structure] |
| 80 | 409194.1 | Human Ig rearranged B7 protein mRNA VC1-region, complete cds. | [chemical structure] |
| 81 | 258971CB1 | interferon-induced protein 56 | [chemical structure] |
| 82 | 231486.27 | Human gene for hepatitis C-associated microtubular aggregate protein p44, exon 8. | [chemical structure] |
| 83 | 1930967CB1 | Human semaphorin-III (Hsema-I) mRNA, complete cds. | [chemical structure] |
| 84 | 279117.32 | Human phospholipid scramblase mRNA, complete cds. | [chemical structure] |
| 85 | 898547.1 | proline-rich post-synaptic synaps-associated protein PDZ | [chemical structure] |
| 86 | 202212.16 | Human TNF-related apoptosis inducing ligand TRAIL mRNA, complete cds. | [chemical structure] |
| 87 | 2874529CB1 | protein kinase, interferon-inducible double stranded RNA dependent | [chemical structure] |
| | | Human 69 kDa 2′5′ oligoadenylate synthetase (P69 2-5A synthetase) mRNA, complete cds. | [chemical structure] |
| | | Human G-protein-coupled receptor (EBI 1) mRNA, complete cds. | [chemical structure] |
| 88 | 2705515CB1 | tryptophanyl-tRNA synthetase | [chemical structure] |
| | | interferon stimulated gene (20kD) | [chemical structure] |
| 89 | 1328372.14 | Human interferon-inducible protein 9-27 mRNA, complete cds. | [chemical structure] |
| 90 | 253534.2 | myxovirus (influenza) resistance 1, homolog of murine (interferon-inducible protein p78) | [chemical structure] |
| 91 | 082155CB1 | stimulated trans-acting factor (50 kDa) | [chemical structure] |
| | | small inducible cytokine subfamily A (Cys-Cys), memb 8 (monocyte chemotactic protein 2) | [chemical structure] |
| 92 | 1924205CB1 | myxovirus (influenza) resistance 2, homolog of murine | [chemical structure] |
| 93 | 965517CB1 | Human mRNA for monocyte chemotactic protein-2. | [chemical structure] |
| 94 | 1795309CB1 | Human HEM45 mRNA, complete cds. | [chemical structure] |
| | | Human insulin-like growth factor-binding protein-3 gene, complete cds, clone HL1006d. | [chemical structure] |
| 95 | 816792CB1 | Human vascular endothelial cell growth factor 165 receptor 2 (VEGF165R2) mRNA, complete cds. | [chemical structure] |
| 96 | 3838440CB1 | Human ubiquitin hydrolyzing enzyme I (UBH1) mRNA, partial cds. | [chemical structure] |
| 97 | 3282941CB1 | Human activated B-cell factor-1 (ABF-1) mRNA, complete cds. | [chemical structure] |
| 98 | 1399366.28 | Human mRNA for thrombospondin. | [chemical structure] |
| 99 | 269059.41 | connective tissue growth factor | [chemical structure] |
| | | Human metallothionein-II pseudogene (mt-lips). | [chemical structure] |
| | | immediate early response 3 | [chemical structure] |
| | | inositol 1,4,5-triphosphate receptor, type 1 | [chemical structure] |
| 100 | 5511889CB1 | Down syndrome candidate region 1 | [chemical structure] |
| 101 | 1671522CB1 | Human mRNA for NOT. | [chemical structure] |
| 102 | 1447015.4 | retinal methyl CpG-binding PCM-1; pilot | [chemical structure] |
| 103 | 1306684.34 | nuclear receptor subfamily 4, group A, member 1 | [chemical structure] |
| 104 | 440806.3 | Human pilot mRNA. | [chemical structure] |
| 105 | 3493433 | nuclear receptor subfamily 4, group A, member 3 | [chemical structure] |
| | | adipose differentiation-related protein; adipophilin | [chemical structure] |
| | | Human antigen CD36 (clone 13) mRNA, complete cds. | [chemical structure] |
| | | Homo sapiens mRNA for zinc finger protein, complete cds | [chemical structure] |
| | | Human mRNA for P2 protein of peripheral myelin. | [chemical structure] |
| | | apolipoprotein C-I | [chemical structure] |
| | | Human mRNA for white gene protein. | [chemical structure] |
| | | Human lipoprotein lipase mRNA, complete cds. | [chemical structure] |
| | | Human pyruvate dehydrogenase kinase isoform 4 mRNA, complete cds. | [chemical structure] |
| | | Human TNFR-related death receptor-6 (DR6) mRNA, complete cds. | [chemical structure] |
| | | Human fatty acid binding protein homologue (PA-FABP) mRNA, complete cds. | [chemical structure] |
| | | Human ECRP gene for eosinophil cationic related protein | [chemical structure] |
| 106 | 277161.34 | CD-20-like precursor, dendritic cell HAIRB | [chemical structure] |
| | | allograft inflammatory factor 1 | [chemical structure] |
| | | ferritin, heavy polypeptide 1 | [chemical structure] |
| | | Human ferritin heavy-chain gene, exons 2, 3 and 4. | [chemical structure] |
| 107 | 2588008CB1 | regulator of G-protein signalling 1 | [chemical structure] |
| 108 | 1794550CB1 | ras homolog gene family, member E | [chemical structure] |
| | | RhoE=26 kda GTPase homolog [Human, HeLa cell line, mRNA, 833 nt]. | [chemical structure] |
| | | Human glia-derived nexin (GDN) mRNA, 5′ end. | [chemical structure] |
| | | Human glia-derived nexin (GDN) mRNA, 5′ end. | [chemical structure] |
| 109 | 75272.34 | upregulated by 1,25-dihydroxyvitamin D-3 | [chemical structure] |
| | | interferon (gamma)-induced cell line; protein 10 from | [chemical structure] |
| 110 | 236030.3 | Human mRNA for gamma-interferon inducible early response gene (with homology to platelet proteins). | [chemical structure] |
| 111 | 1749102CB1 | indoleamine-pyrrole 2,3 dioxygenase | [chemical structure] |
| | | Human cell-line THP-1 small cytokine B subfamily member 11 SCYB11 precursor, mRNA, complete cds. | [chemical structure] |
| | | Human interferon-gamma-inducible indoleamine 2,3-dioxygenase (IDO) mRNA, complete cds. | [chemical structure] |
| | | Human interleukin-7 receptor (IL-7) mRNA, complete cds. | [chemical structure] |
| 112 | 003360CB1 | Human mRNA for pLD78 peptide, complete cds. | [chemical structure] |
| 113 | 1398150.29 | small inducible cytokine A4 (homologous to mouse Mip-1b) | [chemical structure] |
| 114 | 088564CB1 | Human chemokine exodus-1 mRNA, complete cds. | [chemical structure] |
| | | Human gene for prointerleukin 1 beta. | [chemical structure] |
| | | small inducible cytokine subfamily A (Cys-Cys), member 20 | [chemical structure] |
| | | Human homologue-2 of gene encoding alpha subunit of murine cytokine (MIP1/SCI), complete cds. | [chemical structure] |
| 115 | 149431.7 | interleukin 1, beta | [chemical structure] |
| 116 | 1750533CB1 | Human tumor necrosis factor alpha inducible protein A20 mRNA, complete cds. | [chemical structure] |
| | | tumor necrosis factor, alpha-induced protein 3 | [chemical structure] |
| 117 | 1324237.8 | Human cytokine (GRO-beta) mRNA, complete cds. | [chemical structure] |
| 118 | 1283029.16 | Human CL 100 mRNA for protein tyrosine phosphatase. | [chemical structure] |
| 119 | 128475.1 | Incyte EST; mouse spleen MAIL, nuclear 1-kappaB potentiated by LPS | [chemical structure] |
| 120 | 561301CB1 | Human mRNA for tumor necrosis factor. | [chemical structure] |
| 121 | 828082CB1 | activating transcription factor 3 | [chemical structure] |
| | | superoxide dismutase 2, mitochondrial | [chemical structure] |
| 122 | 1097190.34 | Human mRNA for Mn superoxide dismutase (EC 1.15.1.1.). | [chemical structure] |
| | | BCL2-related protein A1 | [chemical structure] |
| 123 | 637393CB1 | Human mRNA for GRS protein. | [chemical structure] |
| 124 | 191918CB1 | tumor necrosis factor, alpha-induced protein 6 | [chemical structure] |
| | | Human TNF-inducible (TSG-6) mRNA fragment, adhesion receptor CD44 putative cds. | [chemical structure] |
| 125 | 154697CB1 | interferon-induced protein 54 | [chemical structure] |
| 126 | 271804.3 | prostaglandin-endoperoxide synthase 2 (prostaglandin G/H synthase and cyclooxygenase) | [chemical structure] |
| | | Human beta-thromboglobulin-like protein mRNA, complete cds. | [chemical structure] |
| | | Human monocyte interleukin 1 (IL-1) mRNA, complete cds. | [chemical structure] |
| 128 | 1453257.6 | interleukin 8 | [chemical structure] |
| | | peripheral myelin protein 2 | [chemical structure] |
| | | fatty acid binding protein 4, adipocyte | [chemical structure] |

[0212] TABLE 2

| SEQ ID | SEQ ID |
|---|---|
| NO | NO |
| 4 | 128 |
| 5 | 129 |
| 6 | 130 |
| 7 | 131 |
| 8 | 132 |
| 9 | 133 |
| 12 | 134 |
| 15 | 135 |
| 17 | 136 |
| 19 | 137 |
| 21 | 138 |
| 22 | 139 |
| 23 | 140 |
| 24 | 141 |
| 25 | 142 |
| 26 | 143 |
| 27 | 144 |
| 28 | 145 |
| 30 | 146 |
| 32 | 147 |
| 33 | 148 |
| 34 | 149 |
| 35 | 150 |
| 42 | 151 |
| 45 | 152 |
| 47 | 153 |
| 51 | 154 |
| 54 | 155 |
| 55 | 156 |
| 58 | 157 |
| 61 | 158 |
| 62 | 159 |
| 74 | 160 |
| 75 | 161 |
| 76 | 162 |
| 81 | 163 |
| 83 | 164 |
| 87 | 165 |
| 88 | 166 |
| 91 | 167 |
| 92 | 168 |
| 93 | 169 |
| 94 | 170 |
| 95 | 171 |
| 96 | 172 |
| 97 | 173 |
| 100 | 174 |
| 101 | 175 |
| 107 | 176 |
| 108 | 177 |
| 111 | 178 |
| 112 | 179 |
| 114 | 180 |
| 116 | 181 |
| 120 | 182 |
| 121 | 183 |
| 123 | 184 |
| 124 | 185 |
| 125 | 186 |

The application's sequence listing, which the Patent Office published only in electronic form, follows.

SEQUENCE LISTING (186 sequences)

SEQ ID NO: 1 - DNA, 3441 bp, Homo sapiens
  misc_feature: Incyte ID No: 460023.9
  unsure 1115-1144: a, t, c, g, or other
tgtagatttgtatgcatttctaaagtatgtttttcccccaatgtgaaatttagtagtaaacttaataaatttccattccaactctcaagtctgtaatttgactcagaaactatactaaattttttgctaggatggcaatggctatattagtgctgcagaacttcgccatgtgatgacaaaccttggagagaagttaacagatgaagaagttgatgaaatgatcagggaagcagatattgatggtgatggtcaagtaaactatgaaggtaaatgtttcagtctcacgcctcattcttcactttgatttttaagataagaggctctttgttagggaactgatcgaaattagtgacccttccccccaaattaggttgctaaaacagttacttacatttaaccttcttaaaattcagagtgttgtctgcagactaggtaacattgctctgacttgagaacttaatttagaaatatttactatcaggttctatccctacacctggaatcagcattttaataggattcttgggtgattcatgtataaagtttgagaagcactgttcagtgtttgtgtgattgtggaacaatgtggaaagcaaacttattccaagtttcctaaaatgaaattaatgtgactttctttccccgcactgtattgtcttttttctttaattggctttagtctgaaactgaagtttacatgtgcttcaaaagtatcgtatctactaacttttaagatggccatatcaggaagcaaggcatatgaaactgaaggattttgagtaaaactctgtatttttttcatgatgtaactacttaacttagaaaagagcataaaatgtaatgttataaaaattaaacctagcccatagcattgaatttacaatattgtcttgtaatccagcagacttaaaattcaagtctaaactaagagccaagaatgctcttttttatattggcctatctaaagcgttaatttggctcttactaataaacctgaatagttatggttaatgaagttccagcctgggcaataaactagcttccctctgtacttaatggtaattctgaggaaagagaggaatggaaagagtactcagtaattgagtaaatgtgannnnnnnnnnnnnnnnnnnnnnnnnnnnnngctattgactcattttttgtgtacttcttctttttcagagtttgtacaaatgatgacagcaaagtgaagaccttgtacagaatgtgttaaatttcttgtacaaaattgtttatttgccttttctttgtttgtaacttatctgtaaaaggtttctccctactgtcaaaaaaatatgcatgtatagtaattaggacttcattcctccatgttttcttcccttatcttactgtcattgtcctaaaaccttattttagaaaattgatcaagtaacatgttgcatgtggcttactctggatatatctaagcccttctgcacatctaaacttagatggagttggtcaaatgagggaacatctgggttatgccttttttaaagtagttttctttaggaactgtcagcatgttgttgttgaagtgtggagttgtaactctgcgtggactatggacagtcaacaatatgtacttaaaagttgcactattgcaaaacgggtgtattatccaggtactcgtacactatttttttgtactgctggtcctgtaccagaaaccttttacagataagttacaaacaaagaaaaggcaaataaacaattttgtacaagaaatttaacacattctgtacaaggtcttcactttgctgtcatcatttgtacaaactcttcatagtttacttgaccatcaccatcaatatctgcttccctgatcatttcatcaacttcttcatctgttaacttctctccaaggtttgtcatcacatggcgaagttctgcagcactaatatagccattgccatccttatcaaacacacggaatgcttctctaatttcttcttcactgtctgtgtctttcatttttcttgccatcattgtcagaaattcagggaagtcaattgtgccattaccatcagcatctacttcattaatcatgtcctgtaactctgcttctgtgggattctgcccaagagatctcattacagttcccaattcctttgttgttatagttccatcaccatctttgtcaaatagtgaaaaagcttctttgaattctgcaatctgctcttcagtcagttggtcagcctacaaagagatcaaagaggaaggttagtgacttgagagtatgtagattagcagttacagaaacaagtttaaaacctttcaagggttaccatgtactgtttcatttagttccagcaacaaacacatctggatagaaaatgcacacatctagtttctcttatcttcaaagctaagctgtcttaactccaagtttaagatatacaaatacttcagaatatttttgaaaatatactttagaatccaatagaaacattgcttcctttttcaacgttagaatagctaaacttaagctcacttctattccagatataaatcaccagaaattcccactgaatcaaaatgcttcaggctcacaaaatgaaaattactcccacaaatggttaaacacattgttttgaaattaaagtgattaaaaaaaaaaaaaaggcacaaacttttattccttctcacccagcaggcaaaatgcaaagaatccagagctctgaactacaatactataatatttaccaaatgtttgaaagttcagccatccattttctcttggtttttaaaatcccaaagtaagcccaaggcttgtgatgtttttttaatagcacttggttttcttcagaaaatattttctgccatttgctaaaacccattataaattttatccttattcaatcttaataataaccttacagtggtattatcccctatcttacagataaggaatgaggctagggttaagtgggattggggcacagaaaattagtagaacaaagataaagcactaaggtgtcagacatacccagtaacttttagcttttaattcagagcaccgtaatatataaagatgattgcaaaatatccagactccttgttgtattctttgaacatgcactttctttcactgcttattagtatatacatccatgaagcaactgcttatggggtattgagaagcacagacaagaaatagcctcctatctaaaatccctaccaacatgggagtcaagtatacaatgattaatccattcatttatttataggtaaaagaaaaataaacattgcctggcttcattctttttaaatgaacacacccctgggaaaagtaacaccttaatgggggacacattttctttagggcacatgagaaaattcaagaaggaatccagaaagtagtttattttccctgctcaacaatttttgtttgaccatgatgtaaatcaaattcatttt

SEQ ID NO: 2 - DNA, 4863 bp, Homo sapiens
  misc_feature: Incyte ID No: 1004532.45
  unsure 109, 114: a, t, c, g, or other
caaaaacgcggcaggaatttcaaagcgactctgcagacagcacgcgtgtttcgttcccccgggtcctgtgagcctgggaggtcttgccagtcccgtgggctctcctggncctcnaccctggaggctgacaaggctcgctgacccagaccctcaccgatgaagcctccttctcttttcctccctctcactgccctagagcccaggagccaggcagggcatgggagtggggtgcttcaaggatgaccgcatcgtcttctggacttggatgttctccacctacttcatggagaaatgggctccccggcaggacgacatgcttttctatgtgcgccggaagctggcgtactccggcagcgaaagcggtgcagacgggaggaaggcagctgagcctgaggtggaggtggaggtgtaccggcgggactccaagaagctgccaggcctgggagaccctgacatcgactgggaggagagcgtctgcctgaatctcatcctgcagaagctggactacatggtgacctgtgcggtgtgcacacgtgctgacggcggggacattcacatccataagaagaaatctcagcaagtgttcgcgtcccccagtaaacaccccatggacagcaagggggaggagtccaagatcagctaccccaacatcttcttcatgattgacagcttcgaggaggtgttcagcgacatgaccgtaggggaaggagagatggtctgtgtggagctggtggctagtgacaaaaccaacacgttccagggggtcatctttcagggctccatccgctacgaggcgctcaagaaggtgtatgacaaccgggtgagcgtggccgcccgcatggcacagaagatgtcgtttggcttctacaagtacagcaacatggagtttgtgcgcatgaagggcccccagggcaagggccacgccgagatggcggtcagccgagtgtctacaggtgacacatccccctgtgggactgaagaggactccagcccagcttcgcccatgcacgagcgggtgacctccttcagcacaccccccaccccagaacggaacaaccggcctgccttcttctccccatccctcaagaggaaggtgccccggaaccggatcgctgagatgaagaagtcgcactcggccaacgacagcgaggagttcttccgggaggacgacggtggagccgatctgcacaatgcaaccaacctgcggtctcggtccctgtcgggcacaggacggtccctggtcgggtcctggctgaagctgaacagagcagatggaaacttccttctctatgcacacttaacctacgtcacgttgccgctgcatcggattttaacagacatcctggaagttcggcagaagcccatcctgatgacctagccgcgtgcggagcctgcgcagagccccggccgggcccagccctcggagtgctgccaagtgcctacctgtccaccgccaccggggtctgcgatggcacgccagtgctggagccgcagccaggcgaggccactcgactcccggggccggggccgactccacgaacaccagcccaaactgaagtgcctcttccctcccctgctggcgctgctccgccctgtgccccccgcccatcgccccccacccatctctggagagccctctgcacccaaagaggactagagatgccgagcggccatgagagagagcggaaggagcagctgatgcccagagcggggccagagcggcgggtctatgttcacgtccccccagcagcaggcggaaccacccagccagggcactcagtgcattggactgtccacatgttcttgaggaaagccggtggaagattctggaatgccgtgcggatgaacttcagcgcccgagtcagtcccagctcatcctccccagtttaccactttgttctaataggagatgggaacacgagaagtttgatggctttgccctgggctgggaatacctcacccacgcccagttccagaaaggcctccagctgagcagacggccccgatcccgccagaacggccttttgcttccagccaaagaacaccgccaacacgcacacctccaacctgggacatcccacgctgggcctcgcacggaggaacctgcagaatttggattctgagggtagtcgggaggcctcggtagccaggcagaacaggatatctgccaaagggtgtctgatgtggggtggggctggcatcctcccaggaaggttctaggtgggaccccgtcttctgggggcgggggtgtcttttcatcttccctggtttcctagaactcacttcctttgacggcgtgtgttggtcccatctctcagaccagctcactgaggcagaggagttgctcagaggctcacatgggcacccccattggttcgtgtgagcagctgcccagccccaggcctgccctcggcctggtccagcatgaaggcgtttccatctgcaaggatgcacggtaccctccccgagagcaggcctgtcccctacccaactgggaataaactggaagctgggtctctttgttgctatgtttttttgtttgaagttcccaggaatatttgaggggttccggtgatgtgtttagggatcttctctgtgggggaaaaggaagaggagggtcttgttctcccatctgtttattctttgggctctgggaacaggggactactttggggctttctccagacttttgtatgttgttattaaaagcgagctattgcatttcattctgcctcagtttgcccacctgtgaaatggggctgataccacctacctcactgaagtcccagggttcaagtgtgtggctgggtcagggcgtggtcacccgtcattctgcataggtcgggttggatgttagactcctgggatgccctcctcccccctcgccctttgtaataacctaatctgagaccgtgcttggtggggggatgtgaactttctctctcccccagcagtgtctgctcaggcctgacagctcagctctgcacgatttcatgttcctaaacccatgtcttagggcagcacagagccaggtcatgtcatgccccaaagtgtggggacagagcctcagggagccccgagcatggtccagccccatttgagtgctctccggggatgccaaatgctgcttccaagtttgagtccatgtggctaaaatacacccatttcttcaggaactcttcccctggttgttctggggatcttgggagaaacacagccctgacagctcgtccgtgggaagatgaggcagtccaggttgtgaggagcacagcggcccgccctctgttctcagaggtgaggggcgggagaaggttgtctcctctggggccagcatttggccaagctcggaggcttggccagcactgctggatggctcagagcaagctgggctccccgtctgtaagatggcaaaaatgctgcccccctcacagggtgaccatgaggaccagtcacagtgatgtgtgaaagggctcgctggtcacagaaacgtgtacaaatcatgctattttagagatcagccctcaatttgtaaggcatgtgaacagggcacgcggtgggctggtggtttcatagccgacacacagcgcctaccatgtgcagctgcctgtccgaccccatcttacagacgagaaaaccagcacacaggcaccaaggaactgtccggaactaacagcaggggccggcgatgggagtcaaacccaggcacgcggcctggcctgcatgctgagccacatggtgctgtccggacagatggacagacactcggtggagtctgcctttctcaggccctaaatccctctccaaagggtacttgcgatgccggatttaaaacttgctcagagccacttagccacttgagaaccagacagtaaggtgttactcccaggtttgtttttccaaagtaacagatgacatgtggaataaagtaatagagtaacaagtggcagggccagaaccagggtccccaaagtcctggtgttggcacatttgtacttcttgtaagaccatctttaatttttctgggaacacacctgccttttgtgtaatgcggggaagactaatgcatggtgacacctagttttcctcaacaggacacttgatcccaaaacccctttaagaccttaggtttcctcagcggaaaactgtactttaatcccaaaccccctttaagacatattggggctgagccactgtgcccagccaaaagagaaatttctacatgaacaaggcaatttcagtgtcttacagcggccaaaccatgacgtgaagaatgagataggagacaggagatcaccataagcgtccctgatatagcagcacacattttcacgtttccacttaaatcgttttgcacaaagtcttgcttcgctcagatgagatgagatatgatttcctagagatgtaaaaataagaatgaatgtggcgcccccttcttccagatgtaatagaaagctctgccctatcacaaggggggtgttgaagcgccccttgtgttttaactgtatttaactgagcacaagatgcacaagctgtggtgggaaaccctcagtttacctttggagtcttccctgcagatcgcagaccttgtgaagtattcttaattataacttgcctttcagcgatggtacatgacttgattcaacgtttggttctgaacttacacactgatgcgtttactcatctaacataatctgacagggcctcagcaagggagccatacatttttgtaacattttgatatgttttaatgcatctgacttagatcttactgaaataaagcactttcctaaaaaaaatctatgtcgggtgcggagaaagaggtaatgaatggcaggaattcgatatgcaagcttatcgaaccgt

SEQ ID NO: 3 - DNA, 3268 bp, Homo sapiens
  misc_feature: Incyte ID No: 1383324.156
tggaggagtgcagcgccgccgccaagatggcggacctggaggcggtgctggccgacgtgagctacctgatggccatggagaagagcaaggccacgccggccgcgcgcgccagcaagaagatactgctgcccgagcccagcatccgcagtgtcatgcagaagtacctggaggaccggggcgaggtgacctttgagaagatcttttcccagaagctggggtacctgctcttccgagacttctgcctgaaccacctggaggaggccaggcccttggtggaattctatgaggagatcaagaagtacgagaagctggagacggaggaggagcgtgtggcccgcagccgggagatcttcgactcatacatcatgaaggagctgctggcctgctcgcatcccttctcgaagagtgccactgagcatgtccaaggccacctggggaagaagcaggtgcctccggatctcttccagccatacatcgaagagatttgtcaaaacctccgaggggacgtgttccagaaattcattgagagcgataagttcacacggttttgccagtggaagaatgtggagctcaacatccacctgaccatgaatgacttcagcgtgcatcgcatcattgggcgcgggggctttggcgaggtctatgggtgccggaaggctgacacaggcaagatgtacgccatgaagtgcctggacaaaaagcgcatcaagatgaagcagggggagaccctggccctgaacgagcgcatcatgctctcgctcgtcagcactggggactgcccattcattgtctgcatgtcatacgcgttccacacgccagacaagctcagcttcatcctggacctcatgaacggtggggacctgcactaccacctctcccagcacggggtcttctcagaggctgacatgcgcttctatgcggccgagatcatcctgggcctggagcacatgcacaaccgcttcgtggtctaccgggacctgaagccagccaacatccttctggacgagcatggccacgtgcggatctcggacctgggcctggcctgtgacttctccaagaagaagccccatgccagcgtgggcacccacgggtacatggctccggaggtcctgcagaagggcgtggcctacgacagcagtgccgactggttctctctggggtgcatgctcttcaagttgctgcgggggcacagccccttccggcagcacaagaccaaagacaagcatgagatcgaccgcatgacgctgacgatggccgtggagctgcccgactccttctcccctgaactacgctccctgctggaggggttgctgcagagggatgtcaaccggagattgggctgcctgggccgaggggctcaggaggtgaaagagagcccctttttccgctccctggactggcagatggtcttcttgcagaagtaccctcccccgctgatccccccacgaggggaggtgaacgcggccgacgccttcgacattggctccttcgatgaggaggacacaaaaggaatcaagttactggacagtgatcaggagctctaccgcaacttccccctcaccatctcggagcggtggcagcaggaggtggcagagactgtcttcgacaccatcaacgctgagacagaccggctggaggctcgcaagaaagccaagaacaagcagctgggccatgaggaagactacgccctgggcaaggactgcatcatgcatggctacatgtccaagatgggcaaccccttcctgacccagtggcagcggcggtacttctacctgttccccaaccgcctcgagtggcggggcgagggcgaggccccgcagagcctgctgaccatggaggagatccagtcggtggaggagacgcagatcaaggagcgcaagtgcctgctcctcaagatccgcggtgggaaacagttcattttgcagtgcgatagcgaccctgagctggtgcagtggaagaaggagctgcgcgacgcctaccgcgaggcccagcagctggtgcagcgggtgcccaagatgaagaacaagccgcgctcgcccgtggtggagctgagcaaggtgccgctggtccagcgcggcagtgccaacggcctctgacccgcccacccgccttttataaacctctaatttattttgtcgaatttttattatttgttttcccgccaagcggaaaaggttttattttgtaattattgtgatttcccgtggccccagcctggcccagctcccccgggaggggcccgcttgcctcggctcctgctgcaccaacccagccgctgcccggcgccctctgtcctgacttcaggggctgcccgctcccagtgtcttcctgtgggggaagagcacagccctcccgccccttccccgagggatgatgccacaccaagctgtgccaccctgggctctgtgggctgcactctgtgcccatgggcactgctgggtggcccatcccccctcaccaggggcaggcacagcacagggatccgacttgaattttcccactgcaccccctcctgctgcagaggggcaggccctgcactgtcctgctccacagtgttggcgagaggaggggcccgttgtctccctggccctcaaggcctcccacagtgactcgggctcctgtgcccttattcaggaaaagcctctgtgtcactggctgcctccactcccacttccctgacactgcggggcttggctgagagagtggcattggcagcaggtgctgctaccctccctgctgtcccctcttgccccaacccccagcacccgggctcagggaccacagcaaggcacctgcaggttgggccatactggcctcgcctggcctgaggtctcgctgatgctgggctgggtgcgaccccatctgcccaggacggggccggccaggtgggcgggcagcacagcaaggaggctggctggggcctatcagtgtgccccccatcctggcccatcagtgtacccccgcccaggctggccagccccacagcccacgtcctgtcagtgccgccgcctcgcccaccgcatgccccctcgtgccagtcgcgctgcctgtgtggtgtcgcgccttctcccccccggggctgggttggcgcaccctcccctcccgtctactcattccccggggcgtttctttgccgatttttgaatgtgattttaaagagtgaaaaatgagactatgcgtttttataaaaaatggtgcctaaaaaaaatctatgtcgggtgcggagaaagaggtaatgaaatggcaggaattcgatagcaagcttatc

SEQ ID NO: 4 - DNA, 2881 bp, Homo sapiens
  misc_feature: Incyte ID No: 1400053CB1
  unsure 2821: a, t, c, g, or other
ggattagaagttgtttggggcattggggttatgcttggggaagccctacccctcatttgtcccctggaaagttggtagaattgttctagggctggcctcttggagaatcctttggagcttggagcttgtgcactttttttgtagtatgcacaacagaaatttatttctcacaattttggaggctgagaagtccttgataaagatgccagcagatgtgatgtctggtgagggcccattttctggttcatagatggtgccttcttcctgtgtcttcacatggtggaagggcatacaagctctctgaagtccctctctccctcctcctcaggttctctatcgacgagtctggtagctgagcgttgggctgtaggtcgctgtgctgtgtgatcccccagagccatgcccgagatagtggatacctgttcgttggcctctccggcttccgtctgccggaccaagcacctgcacctgcgctgcagcgtcgactttactcgccggacgctgaccgggactgctgctctcacggtccagtctcaggaggacaatctgcgcacgctggttttggatacaaaggaccttacaatagaaaaagtagtgatcaatggacaagaagtcaaatatgctcttggagaaagacaaagttacaagggatcgccaatggaaatctctcttcctatcgctttgagcaaaaatcaagaaattgttatagaaatttcttttgagacctctccaaaatcttctgctctccagtggctcactcctgaacagacttctgggaaggaacacccatatctctttagtcagtgccaggccatccactgcagagcaatccttccttgtcaggacactccttctgtgaaattaacctatactgcagaggtgtctgtccctaaagaactggtggcacttatgagtgctattcgtgatggagaaacacctgacccagaagacccaagcaggaaaatatacaaattcatccaaaaagttccaataccctgctacctgattgctttagttgttggagctttagaaagcaggcaaattggcccaagaactttggtgtggtctgagaaagagcaggtggaaaagtctgcttatgagttttctgagactgaatctatgcttaaaatagcagaagatctgggaggaccgtatgtatggggacagtatgacctattggtcctgccaccatccttcccttatggtggcatggagaatccttgccttacttttgtaactcctactctactggcaggcgacaagtcactctccaatgtcattgcacatgaaatatctcatagctggacagggaatctagtgaccaacaaaacttgggatcacttttggttaaatgagggacatactgtgtacttggaacgccacatttgcggacgattgtttggtgaaaagttcagacattttaatgctctgggaggatggggagaactacagaattcggtaaagacatttggggagacacatcctttcaccaaacttgtggttgatctgacagatatagaccctgatgtagcttattcttcagttccctatgagaagggctttgctttacttttttaccttgaacaactgcttggaggaccagagattttcctaggattcttaaaagcttatgttgagaagttttcctataagagcataactactgatgactggaaggatttcctgtattcctattttaaagataaggttgatgttctcaatcaagttgattggaatgcctggctctactctcctggactgcctcccataaagcccaattatgatatgactctgacaaatgcttgtattgccttaagtcaaagatggattactgccaaagaagatgatttaaattcattcaatgccacagacctgaaggatctctcttctcatcaattgaatgagtttttagcacagacgctccagagggcacctcttccattggggcacataaagcgaatgcaagaggtgtacaacttcaatgccattaacaattctgaaatacgattcagatggctgcggctctgcattcaatccaagtgggaggacgcaattcctttggcgctaaagatggcaactgaacaaggaagaatgaagtttacccggcccttattcaaggatcttgctgcctttgacaaatcccatgatcaagctgtccgaacctaccaagagcacaaagcaagcatgcatcccgtgactgcaatgctggtggggaaagacttaaaagtggattaaagacctgcgtattgatgattttagagatttctcttttttaaatggaattcgtaaagaaatataaaacttcagctcacaattaaaactgtctttttagttttggctttttattgttttgttggtgattttactgaaataaagttgagctacttcttcttaaaataggaagtcggaggaagaaggactaaccagctccctggagtatagaggaatatgctttccctgtcatgccaccaggggctatatgtgccacctttcaggttggggccaaggaagtgatttcaatgtgacacccgggagattttgacctccagacgtcagccgcccgttccattgtggcacatgtttcaatctgagtgttgtttgccttagctgtggtcggaatagcttcattgggtggtaccgttgttatcaggtgtaccgaagcagtttttgtctaggttttaaggctttgctcttcgtttgtcattagaggatttctacgcagatcatccaggagtccggttttctttgccagttcgagaaccgataatcatttaacgagtttctatggtaaggttaggggccctgatgtatattatctcantatccagtgcctaggtttaaataccggttctgcgattataaatgggaaaagggctttttt

SEQ ID NO: 5 - DNA, 1505 bp, Homo sapiens
  misc_feature: Incyte ID No: 2874030CB1
tctcagacactcacacggaccctatagaatcctatatcctgctggactaaacaccccatggatctaggaagccctggaagctgcttcctcagacatgccgctgctgctactgctgcccctgctgtgggcaggggccctggctatggatccaaatttctggctgcaagtgcaggagtcagtgacggtacaggagggtttgtgcgtcctcgtgccctgcactttcttccatcccataccctactacgacaagaactccccagttcatggttactggttccgggaaggagccattatatccggggactctccagtggccacaaacaagctagatcaagaagtacaggaggagactcagggcagattccgcctccttggggatcccagtaggaacaactgctccctgagcatcgtagacgccaggaggagggataatggttcatacttctttcggatggagagaggaagtaccaaatacagttacaaatctccccagctctctgtgcatgtgacagacttgacccacaggcccaaaatcctcatccctggcactctagaacccggccactccaaaaacctgacctgctctgtgtcctgggcctgtgagcagggaacacccccgatcttctcctggttgtcagctgcccccacctccctgggccccaggactactcactcctcggtgctcataatcaccccacggccccaggaccacggcaccaacctgacctgtcaggtgaagttcgctggagctggtgtgactacggagagaaccatccagctcaacgtcacctatgttccacagaacccaacaactggtatctttccaggagatggctcagggaaacaagagaccagagcaggagtggttcatggggccattggaggagctggtgttacagccctgctcgctctttgtctctgcctcatcttcttcatagtgaagacccacaggaggaaagcagccaggacagcagtgggcaggaatgacacccaccctaccacagggtcagcctccccgaaacaccagaagaagtccaagttacatggccccactgaaacctcaagctgttcaggtgccgcccctactgtggagatggatgaggagctgcattatgcttccctcaactttcatgggatgaatccttccaaggacacctccaccgaatactcagaggtcaggacccagtgaggaacccacaagagcatcaggctcagctagaagatccacatcctctacaggtcggggaccaaaggctgattcttggagatttaacaccccacaggcaatgggtttatagacattatgtgagtttcctgctatattaacatcatcttagactttgcaagcagagagtcgtggaatcaaatctgtgctctttcatttgctaagtgtatgatgtcacacaagctccttaaccttccatgtctccattttcttctctgtgaagtaggtataagaagtcctatctcatagggatgctgtgagcattaaataaaggtacaca

SEQ ID NO: 6 - DNA, 3406 bp, Homo sapiens
  misc_feature: Incyte ID No: 2049950CB1
ggcacgaggctgagtgtccgtctcgcgcccggaagcgggcgaccgccgtcagcccggaggaggaggaggaggaggaggaggagggggcggccatggggctgctgtcccagggctcgccgctgagctgggaggaaaccaagcgccatgccgaccacgtgcggcggcacgggatcctccagttcctgcacatctaccacgccgtcaaggaccggcacaaggacgttctcaagtggggcgatgaggtggaatacatgttggtatcttttgatcatgaaaataaaaaagtccggttggtcctgtctggggagaaagttcttgaaactctgcaagagaagggggaaaggacaaacccaaaccatcctaccctttggagaccagagtatgggagttacatgattgaagggacaccaggacagccctacggaggaacaatgtccgagttcaatacagttgaggccaacatgcgaaaacgccggaaggaggctacttctatattagaagaaaatcaggctctttgcacaataacttcatttcccagattaggctgtcctgggttcacactgcccgaggtcaaacccaacccagtggaaggaggagcttccaagtccctcttctttccagatgaagcaataaacaagcaccctcgcttcagtaccttaacaagaaatatccgacataggagaggagaaaaggttgtcatcaatgtaccaatatttaaggacaagaatacaccatctccatttatagaaacatttactgaggatgatgaagcttcaagggcttctaagccggatcatatttacatggatgccatgggatttggaatgggcaattgctgtctccaggtgacattccaagcctgcagtatatctgaggccagatacctttatgatcagttggctactatctgtccaattgttatggctttgagtgctgcatctcccttttaccgaggctatgtgtcagacattgattgtcgctggggagtgatttctgcatctgtagatgatagaactcgggaggagcgaggactggagccattgaagaacaataactataggatcagtaaatcccgatatgactcaatagacagctatttatctaagtgtggtgagaaatataatgacatcgacttgacgatagataaagagatctacgaacagctgttgcaggaaggcattgatcatctcctggcccagcatgttgctcatctctttattagagacccactgacactgtttgaagagaaaatacacctggatgatgctaatgagtctgaccattttgagaatattcagtccacaaattggcagacaatgagatttaagccccctcctccaaactcagacattggatggagagtagaatttcgacccatggaggtgcaattaacagactttgagaactctgcctatgtggtgtttgtggtactgctcaccagagtgatcctttcctacaaattggattttctcattccactgtcaaaggttgatgagaacatgaaggtagcacagaaaagagatgctgtcttgcagggaatgttttatttcaggaaagatatttgcaaaggtggcaatgcagtggtggatggttgtggcaaggcccagaacagcacggagctcgctgcagaggagtacaccctcatgagcatagacaccatcatcaatgggaaggaaggtgtgtttcctggactgatcccaattctgaactcttaccttgaaaacatggaagtggatgtggacaccagatgtagtattctgaactacctaaagctaattaagaagagagcatctggagaactaatgacagttgccagatggatgagggagtttatcgcaaaccatcctgactacaagcaagacagtgtcataactgatgaaatgaattatagccttattttgaagtgtaaccaaattgcaaatgaattatgtgaatgcccagagttacttggatcagcatttaggaaagtaaaatatagtggaagtaaaactgactcatccaactagacattctacagaaagaaaaatgcattattgacgaactggctacagtaccatgcctctcagcccgtgtgtataatatgaagaccaaatgatagaactgtactgttttctgggccagtgagccagaaattgattaaggctttctttggtaggtaaatctagagtttatacagtgtacatgtacatagtaaagtatttttgattaacaatgtattttaataacatatctaaagtcatcatgaactggcttgtacatttttaaattcttactctggagcaacctactgtctaagcagttttgtaaatgtactggtaattgtacaatacttgcattccagagttaaaatgtttactgtaaatttttgttcttttaaagactacctgggacctgatttattgaaatttttctctttaaaaacattttctctcgttaattttcctttgtcatttcctttgttgtctacattaaatcacttgaatccattgaaagtgcttcaagggtaatcttgggtttctagcaccttatctatgatgtttcttttgcaattggaataatcacttggtcaccttgccccaagctttcccctctgaataaatacccattgaactctgatggctgttatcaaaggaacttttctttgtttaaatttgctgatgcaggaattaagtttaaacacaactctatagaaagaaaggagattattacccagaattcacatgtagtgattattaaggacaattttttttttaactaaaaaagttggcggcaggggtggggggtggcaatcatttttcttcctatacatacaaaggatattgtcaaaaatggcgttcttctcttgtggcctgttattctgattgctgctgtatacagttttgtcactctttagtttttagttaagcatactgatagactttcctctaaaagccattcactccagattttacctggggaatattctacatactgcttactttctctataaaactcatcaataaatcatgaaaggcactgagttttgtaaatcaggaccctaaatgtttaattgtaaataagtttcagataattattatagctttgcgttgaagtttgttgttttttttctcaactagttaagtcaactgcttctgaaataactctgtattgtagattatgcagatctttacaggcataaatatttaaactgtaatatgctaacttgaagagattgcaataaagctgcttcagctaaccctgtttatgtttaaatactagggtttgttctatattttatacatgcattttggatgattaaagaatgcctggttttcgtttgcaatttgcttgtgtaaatcaggttgtaaaaaggcagataaattgaaatgtttgtggtatgaggaaataaaagaatggaattagcttt

SEQ ID NO: 7 - DNA, 1473 bp, Homo sapiens
  misc_feature: Incyte ID No: 3257507CB1
cccacgtgggggctcagcgtgcacccttctttgtgctcgggttaggaggagctaggctgccatcgggccggtgcagatacggggttgctcttttgctcataagaggggcttcgctggcagtctgaacggcaagcttgagtcaggacccttaattaagatcctcaattggctggagggcagatctcgcgagtagggcaacgcggtaaaaatattgcttcggtgggtgacgcggtacagctgcccaagggcgttcgtaacgggaatgccgaagcgtgggaaaaagggagcggtggcggaagacggggatgagctcaggacagagccagaggccaagaagagtaagacggccgcaaagaaaaatgacaaagaggcagcaggagagggcccagccctgtatgaggaccccccagatcagaaaacctcacccagtggcaaacctgccacactcaagatctgctcttggaatgtggatgggcttcgagcctggattaagaagaaaggattagattgggtaaaggaagaagccccagatatactgtgccttcaagagaccaaatgttcagagaacaaactaccagctgaacttcaggagctgcctggactctctcatcaatactggtcagctccttcggacaaggaagggtacagtggcgtgggcctgctttcccgccagtgcccactcaaagtttcttacggcataggcgatgaggagcatgatcaggaaggccgggtgattgtggctgaatttgactcgtttgtgctggtaacagcatatgtacctaatgcaggccgaggtctggtacgactggagtaccggcagcgctgggatgaagcctttcgcaagttcctgaagggcctggcttcccgaaagccccttgtgctgtgtggagacctcaatgtggcacatgaagaaattgaccttcgcaaccccaaggggaacaaaaagaatgctggcttcacgccacaagagcgccaaggcttcggggaattactgcaggctgtgccactggctgacagctttaggcacctctaccccaacacaccctatgcctacaccttttggacttatatgatgaatgctcgatccaagaatgttggttggcgccttgattactttttgttgtcccactctctgttacctgcattgtgtgacagcaagatccgttccaaggccctcggcagtgatcactgtcctatcaccctatacctagcactgtgacaccacccctaaatcactttgagcctgggaaataagccccctcaactaccattccttctttaaacactcttcagagaaatctgcattctatttctcatgtataaaactaggaatcctccaaccaggctcctgtgatagagttcttttaagcccaagattttttatttgagggttttttgttttttaaaaaaaaattgaacaaagactactaatgactttgtttgaattatccacatgaaaataaagagccatag

SEQ ID NO: 8 - DNA, 3805 bp, Homo sapiens
  misc_feature: Incyte ID No: 2676869CB1
  unsure 3788: a, t, c, g, or other
gcgaccgctcgtccgccggcttgaggcccgcggggaggcgcgcaattcgtcggcccgcgggggggcggccatcccggcagtcttcgcggcgaccaaggactaccaggaaggggagcggctgggatggcgcgtccgcggccccgcgagtacaaagcgggcgacctggtcttcgccaagatgaagggctacccgcactggccggcccggattgatgaactcccagagggcgctgtgaagcctccagcaaacaagtatcctatcttcttttttggcacccatgaaactgcatttctaggtcccaaagacctttttccatataaggagtacaaagacaagtttggaaagtcaaacaaacggaaaggatttaacgaaggattgtgggaaatagaaaataacccaggagtaaagtttactggctaccaggcaattcagcaacagagctcttcagaaactgagggagaaggtggaaatactgcagatgcaagcagtgaggaagaaggtgatagagtagaagaagatggaaaaggcaaaagaaagaatgaaaaagcaggctcaaaacggaaaaagtcatatacttcaaagaaatcctctaaacagtcccggaaatctccaggagatgaagatgacaaagactgcaaagaagaggaaaacaaaagcagctctgagggtggagatgcgggcaacgacacaagaaacacaacttcagacttgcagaaaaccagtgaagggacctaactaccataatgaatgctgcatattaagagaaaccacaagaaggttatatgtttggttgtctaatattcttggatttgatatgaaccaacacatagtccttgttgtcattgacagaaccccagtttgtatgtacattattcatattcctctctgttgtgtttcggggggaaaagacattttagccttttttaaaagttactgatttaatttcatgttatttggttgcatgaagttgcccttaaccactaaggattatcaagatttttgcgcagacttatacatgtctaggatccttttatcaaggcagttatgatcatcgttttcctgccttgaccccaccatcatcaaacactcagttaaatataaattaacattttttagatgaccactcaacataatgcttaagaatggaatttcctctctgtgacagaacccaggaattaattcctaaatacataacgttggtatattgaagacgaaattaaaattgtccttcagttttgaggccatgtgtaaagtttaaccatattgtaaaatatctattccgtattagaaatagctagttgacagcttatacttctcaaaattcatattgttatgtacacaaactaagtttctatatgtgaagttagtgagtctttttgtgttactccaaaataaaggcaatgatttatttttttcccagtgccaatacaattttgagctaagcactcaaggtggatactttacattttaaagctggaatcagcaacagccctatgggaaaccagacaaagcattgacttttaaatgtagacttttaaaataaactgttttcttttggaactacaattagaatagttaatattcatccttaaaccattattatgtgtacattattgttgctattgtgataatagagaattttatttatttttatgccagcttatattgtgagaacacatttagtcagtttgggttttatcaatcctgttaatgcttgtccttggaacatctttcgcgtattcacggtttgtagttgaaaagtttactgtaaaaaaatcaaaaacaaaaaaatgtattgtttttacagaataaatttattggaatgtgtactgggagtaagatttgaggttgtaagcaaactaagttagtgtaatttggcttcatatatgtaacgtgaggtattaatgtaattcatatattaaagcaaaaattgttcacagcaagctgacaatagaatcaagtgcaggtgagggtttttctttttctttctttttttttttttaaacactctctgggttttagattatttgaaaacactgtaggggatgatggggagatgactacatgatttgcttacacttacatatttaccagcccagtggaccctagattttgtaatttgatattatccatgcattgatttgtatcccattttcttttggttttcttgatgagagctaataaaaacatgagaaaatgtgagcagacctaaaagcctagggccgttaataatgatgatggtgatgatggcagctaagggtatgaaagcaccagtccatttatcattccagggcacagtgaggaggtggctgtttgtatttttggtgtgtttctttcatttagtgaatactgattttctctagtatactcaacatacaatcccaaacatgaaaagttcataaaaagatagtagggatgtcgatctaatacttcttccttaaaaggtcctttttaattttgaatatttgaatgtattttttaattaatgaaatttaattcatcaaaagacctcttcattgctcacactgaaacataaggggaatgtagatggcattttgaattggaatatacaactcacaaattttctttaaaagcgttttatgtgtatatatgaaatgtttcaaatttaataagatttgtctttataagaggccaaaaataattttattaaaaatatacacagaaatacaatagaaatatttccagccaccaataaaacaaatgttcattaaggatagagataaagttactgatccctatttagctgtttaaattcacacaaaaaaatttagtaaaagtaattttcttgaaacagcagcaaataataaactttccttgggaaaacatttttcaaacaacatttaaaaatattctgatgatttgccttttatattgagtttaataatgaagcatattcatcttatttgcaaaagttactcctccagtctgcattcactgttttgaattttttaatatgcacaggccatattctcttttgaatagtttcatttcatgctcactactgttggcactaaattgtaattttttacacttataattattttatatgtcaaacaatattgagatggatgatcaagtttattcacaaatgattttgaatatatttctttaaacaaactgtttctcaagaatttccattttccttcaaaaaaaatttacacaataccatatagctcacacatacagtgcagagcaagaatgtacatattcttaagtactcacgtatgagaagagagtgaaatgggacaaaatatcagtaccagtataacaaaagttagtaatttagaaaggaggaacatgaagtaatatttttattccactttttcttctgcctttgtttttatgaagaactctggtttgtagatacaacgataggccaagagctgaggaagaactccatatgctatgtttaatgctaaaaaaaggatttttgcttcttcagggactctgtagacataagcagttctagcatgaagagatgcaccaatgtgagaaaactgagcctgagccagacctccagcatgtatcaatgtgatgtcaggcatccaggaacatccaggaaccactaagccatacagtgcagtcacaaagtaaggaacagaatagaacatatatgccagcatctgaattttaggataagcagcaggatcctttagatagggctcttgaaattgcgtatataatcggcagagctcagatgggcaatccaaagcaatcaaacctctgaacaggcaaaatccagttgcccggacgcgtgggcccacgcnttccgcccacgcgtctg

SEQ ID NO: 9 - DNA, 724 bp, Homo sapiens
  misc_feature: Incyte ID No: 672615CB1
  unsure 722: a, t, c, g, or other
gtgaccggcagccccagacctgcctgccttcctgacttctgttccagagcaaaggtcattcagccgcttgaatcagccttttccccccacccggtccccaactttgtttacccgataaggaaggtcagcattcaaagtcaagaagcgccatttatcttcccgtgcgctctacaaatagttccgtgagaaagatggccgggaactcgatcctgctggctgctgtctctattctctcggcctgtcagcaaagttattttgctttgcaagttggaaaggcaagattaaaatacaaagttacgcccccagcagtcactgggtcaccagagtttgagagagtatttcgggcacaacaaaactgtgtggagttttatcctatattcataattacattgtggatggctgggtggtatttcaaccaagtttttgctacttgtctgggtctggtgtacatatatggccgtcacctatacttctggggatattcagaagctgctaaaaaacggatcaccggtttccgactgagtctggggattttggccttgttgaccctcctaggtgccctgggaattgcaaacagctttctggatgaatatctggacctcaatattgccaagaaactgaggcggcaattctaactttttctcttccctttaatgcttgcagaagctgttcccaccatgaaggtaatatggtatcatttgttaaataaaaataaagtcttnat

SEQ ID NO: 10 - DNA, 3318 bp, Homo sapiens
  misc_feature: Incyte ID No: 1385861.1
ggagaatggccagtggggtaagtggtgagaggaaagacagagaacggagaaggttagatgggcttgggaaattatccaggccctggatggaggtagagatgtgtgctcatgaacacggaggggattactgatgtggggtggatgagactgtcgtcaagagtgtgggacaggaagagagggagagtcttggccagatccaagaaaggagccctcagaagaggaggggagtcagaggcaaggaagggggctgacgtgcagccagcccagctgagtggaccccaggagatggccttcaccatggatcagttccctgaatcagtgacagaaaactttgagtacgatgatttggctgaggcctgttatattggggacatcgtggtctttgggactgtgttcctgtccatattctactccgtcatctttgccattggcctggtgggaaatttgttggtagtgtttgccctcaccaacagcaagaagcccaagagtgtcaccgacatttacctcctgaacctggccttgtctgatctgctgtttgtagccactttgcccttctggactcactatttgataaatgaaaagggcctccacaatgccatgtgcaaattcactaccgccttcttcttcatcggcttttttggaagcatattcttcatcaccgtcatcagcattgataggtacctggccatcgtcctggccgccaactccatgaacaaccggaccgtgcagcatggcgtcaccatcagcctaggcgtctgggcagcagccattttggtggcagcaccccagttcatgttcacaaagcagaaagaaaatgaatgccttggtgactaccccgaggtcctccaggaaatctggcccgtgctccgcaatgtggaaacaaattttcttggcttcctactccccctgctcattatgagttattgctacttcagaatcatccagacgctgttttcctgcaagaaccacaagaaagccaaagccattaaactgatccttctggtggtcatcgtgtttttcctcttctggacaccctacaacgttatgattttcctggagacgcttaagctctatgacttctttcccagttgtgacatgaggaaggatctgaggctggccctcagtgtgactgagacggttgcatttagccattgttgcctgaatcctctcatctatgcatttgctggggagaagttcagaagatacctttaccacctgtatgggaaatgcctggctgtcctgtgtgggcgctcagtccacgttgatttctcctcatctgaatcacaaaggagcaggcatggaagtgttctgagcagcaattttacttaccacacgagtgatggagatgcattgctccttctctgaagggaatcccaaagccttgtgtctacagagaacctggagttcctgaacctgatgctgactagtgaggaaagatttttgttgttatttcttacaggcacaaaatgatggacccaatgcacacaaaacaaccctagagtgttgttgagaattgtgctcaaaatttgaagaatgaacaaattgaactctttgaatgacaaagagtagacatttctcttactgcaaatgtcatcagaactttttggtttgcagatgacaaaaattcaactcagactagtttagttaaatgagggtggtgaatattgttcatattgtggcacaagcaaaagggtgtctgagccctcaaagtgaggggaaaccagggcctgagccaagctagaattccctctctctgactctcaaatcttttagtcattatagatcccccagactttacatgacacagctttatcaccagagagggactgacacccatgtttctctggccccaagggcaaaattcccagggaagtgctctgataggccaagtttgtatcaggtgcccatccctggaaggtgctgttatccatggggaagggatatataagatggaagcttccagtccaatctcatggagaagcagaaatacatatttccaagaagttggatgggtgggtactattctgattacacaaaacaaatgccacacatcacccttaccatgtgcctgatccagcctctcccctgattacaccagcctcgtcttcattaagccctcttccatcatgtccccaaacctgcaagggctccccactgcctactgcatcgagtcaaaactcaaatgcttggcttctcatacgtccaccatggggtcctaccaatagattccccattgcctcctccttcccaaaggactccacccatcctatcagcctgtctcttccatatgacctcatgcatctccacctgctcccaggccagtaagggaaatagaaaaaccctgcccccaaataagaagggatggattccaaccccaactccagtagcttgggacaaatcaagcttcagtttcctggtctgtagaagagggataaggtacctttcacatagagatcatcctttccagcatgaggaactagccaccaactcttgcaggtctcaacccttttgtctgcctcttagacttctgctttccacacctggcactgctgtgctgtgcccaagttgtggtgctgacaaagcttggaagagcctgcaggtgctgctgcgtggcatagcccagacacagaagaggctggttcttacgatggcacccagtgagcactcccaagtctacagagtgatagccttccgtaacccaactctcctggactgccttgaatatcccctcccagtcaccttgtggcaagcccctgcccatctgggaaaataccccatcattcatgctactgccaacctggggagccagggctatgggagcagcttttttttcccccctagaaacgtttggaacaatctaaaactttaaagctcgaaaacaattgtaataatgctaaagaaaaagtcatccaatctaaccacatcaatattgtcattcctgtattcacccgtccagaccttgttcacactctcacatgtttagagttgcaatcgtaatgtacagatggttttataatctgatttgttttcctcttaacgttagaccacaaatagtgctcgctttctatgtagtttggtaattatcattttagaagactctaccagactgtgtattcattgaagtcagatgtggtaactgttaaattgctgtgtatctgatagctctttggcagtctatatgtttgtataatgaatgagagaataagtcatgttccttcaagatcatgtaccccaatttacttgccattactcaattgataaacatttaacttgtttccaatgtttagcaaatacatattttatagaacttcaaaaaaa

SEQ ID NO: 11 - DNA, 4293 bp, Homo sapiens
  misc_feature: Incyte ID No: 1383798.8
ggctgagggctgcataactgatggagggccgggcgcggtaagagcgtctcgggggagtggggcaaggcggccgggcccctcccatgccgccttttcttcagcgtcctacccgcggcactggctgcgagcgccgggccacctgcgagtgtgcgcagggactctggacacccgcggcggcgagctgagggagcagtctccacgaggacccaggcggaccctctggcgccatgcgcgccctccccggcctgctggaggccagggcgcgtacgccccggctgctcctcctccagtgccttctcgctgccgcgcgcccaagctcggcggacggcagtgccccagattcgccttttacaagtccacctctcagagaagaaataatggcaaataacttttccttggagagtcataacatatcactgactgaacattctagtatgccagtagaaaaaaatatcactttagaaaggccttctaatgtaaatctcacatgccagttcacaacatctggggatttgaatgcagtaaatgtgacttggaaaaaagatggtgaacaacttgagaataattatcttgtcagtgcaacaggaagcaccttgtatacccaatacaggttcaccatcattaatagcaaacaaatgggaagttattcttgtttctttcgagaggaaaaggaacaaaggggaacatttaatttcaaagtccctgaacttcatgggaaaaacaagccattgatctcttacgtaggggattctactgtcttgacatgtaaatgtcaaaattgttttcctttaaattggacctggtacagtagtaatgggagtgtaaaggttcctgttggtgttcaaatgaataaatatgtgatcaatggaacatatgctaacgaaacaaagctgaagataacacaacttttggaggaagatggggaatcttactggtgccgtgcactattccaattaggcgagagtgaagaacacattgagcttgtggtgctgagctatttggtgcccctcaaaccatttcttgtaatagtggctgaggtgattcttttagtggccaccattctgctttgtgaaaagtacacacaaaagaaaaagaagcactcagatgaggggaaagaatttgagcagattgaacagctgaaatcagatgatagcaatggtatagaaaataatgtccccaggcatagaaaaaatgagtctctgggccagtgaatacaaaacatcatgtcgagaatcattggaagatatacagagttcgtatttcagctttatttatccttcctgttaagagcctctgagtttttagttttaaaaggatgaaaagcttatgcaacatgctcagcaggagcttcatcaacgatatatgtcagatctaaaggtatattttcattctgtaattatgttacataaaagcaatgtaaatcagaataaatatgttagaccagaataaaattaattatattctggtcttcaaaggacacacagaacagatatcagcagaatcacttaatacttcatagaacaaaaatcactcaaaacctgtttataaccaaagaattcatgaaaaagaaagcctttgccatttgtcttagaaagttattttttttaaaaaaatcatacttactattagtatctatggaagtatatgtaacaatttttatgtaaaggtcatctttctgtgatagtgaaaaaatatgtctttactaagttgaaatgaatactttctgcctttgctaatgatagttattctacaatctccacaagaaaaatataccttttatccggaaatattggtttaaggcaaataaataaaactgtgcttgctctaaagctctgcactacaaaagcaaattttccagtctttattccactcataaccactgctttccccaccaggctaaagtgcttcttagtcttaaatagggtttttaacttcataaggtacaccattgtttatgttttagggtgcaggtccatatagtcgtaatacttaaaacactgctacactgatgcttttgtggctcatggtttcctggttctttgatttaacacctggcttcctggtatctatggctggttaaatatctaaacctgcattattagtgctttacaataataattcccttgactgaagtccagaaatactaaagcacttcttttttattgctgtgaatgccttagacttatcttccaaaataggatacttcgtttctattgcatatataactgaaatattttataaactcactgtaatcaaatcttataaaatctgaatcaacatgaaaagttgtcaatgcttgaatgaatactaaaatcataccacaagatactagataacataaatgaccatgaagtgtcccactgctcaaagggcaacaactttaagaacagaagcaaagagtggtggtgtggaacccaagattcttggcgactagggaatttaaaggttggggaggaggaattcaatgatttgacaagaaatactttataaaaatttgctccatgtattggctaagaaaaatataataaaattttggtagtgaaaattgtatcactaatgtttaccaatattactagtatgaataatacacataaggtagtgacttggaagctgctcaatactttgttgctataacaaaatgcaatattttgttgtaaagcatcttaactacacatataagtttgctgaacttgaatacatcccggtaatggcaaacttcattttattcttggttttcattttattctggtctcagggccatacatttattttagtttaattaattattattttgacaacattacttgggtaatatctatataatggtagataaccaatcagttagcttaattaatctaagctatttgaattcagggaaatattagtcaaatctgctgtttgactaaatacaattcaaagcagtgtatttgtgacttggaatatagaacacaaacaaatgtgtaacccatctgcagtatgcattcttccattttaccaccactaaccattgaggctcatacaattttcaagcaacaagcattgcttcccaaaggtaaaataatcaggaatatttctatagtaaatggagtttttaattggcaatactgtttatttttttctagcaaagacaatttatctcagtaaccttaaataggaaaagtactcaaaaattaaagttgacttttggctttttgtagtctctctggaggacttccagaaaattaccactgttggattttaatctgcttccattaaccaatcttacagagatgataaatgaattaactaatattgaccaaatataaattgactgcaaataataagccgcataaaagttgaagtaggaaaactactccaagtttatatattaggcaccttggggaattctcttagtctttccagctaacaaggattttcagcataataagtagatttaatgatggcataaaattcccagatactttcatatacattttttgccaaagtgtaaatcttctccttttgcagtctttttgttattatcccaacatctagctgctcaggccctaatttagaactcattctgatattttcttcttctgtattaattaatacttatgggtcatgaatccctgctcctttgacctttttaatagctcatgaatccatcccattgcctccccaactctgcccacacctgctgcaacagctaatgccttgattttcctacctcagtctccttttctattaatccctcttttgcgtggctgcctgagtccactttctcaaacacaaacctcactatgcaactttggaatctctgtaggctcacctttgccatttcttaatattgcattctccaaattgctaatctctatccagtctcttgaactagacttggcacatggagattccgctcagaaagtgctcttcacacttctacctgcttgactaaccccagattatctttcaagactttaatctgatcttgtgtcttagagaagcccccatacctggtagagcatgtaccatcttacatgcttaaataactccacatttatttgtgtttattactctgtgttataaatatacatttgttggtctctctcttggattattttgtttctttgtcctgtaactaccactgaaagggtgcaatacagctttcttgaaatgtgtattgaacggatgaatgtataaataaaaattaaattttgtaaatttctgcttattcttagaaaaagaatctaaattgtgacaaatcagaattgaaaaaagtattctaataaagaaaaacaagcttttataacttca

SEQ ID NO: 12 - DNA, 3825 bp, Homo sapiens
  misc_feature: Incyte ID No: 2616727CB1
cgccccagcttttctcggaaccatgaaccccaactgcgcccggtgcggcaagatcgtgtatcccacggagaaggtgaactgtctggataagttctggcataaagcatgcttccattgcgagacctgcaagatgacactgaacatgaagaactacaagggctacgagaagaagccctactgcaacgcacactaccccaagcagtccttcaccatggtggcggacaccccggaaaaccttcgccttaagcaacagagtgagctccagagtcaggtgcgctacaaggaggagtttgagaagaacaagggcaaaggtttcagcgtagtggcagacacgcccgagctccagagaatcaagaagacccaggaccagatcagtaacataaaataccatgaggagtttgagaagagccgcatgggccctagcgggggcgagggcatggagccagagcgtcgggattcgcaggacggcagcagctaccggcggcccctggagcagcagcagcctcaccacatcccgaccagtgccccggtttaccagcagccccagcagcagccggtggcccagtcctatggtggctacaaggagcctgcagccccagtctccatacagcgcagcgccccaggtggtggcgggaagcggtaccgcgcggtgtatgactacagcgccgccgacgaggacgaggtctccttccaggacggggacaccatcgtcaacgtgcagcagatcgacgacggctggatgtacgggacggtggagcgcaccggcgacacggggatgctgccggccaactacgtggaggccatctgaacccgcagcgcccccatctgtcttcagcacattccacggcatcgcatccgtcctgggcgtgacccgtccattcttcagtgtctctgttttttaaaacctgcgacagcttgtgattcctacccctcttccagcttcttttgccaactgaagccttcttctgccacttctgcgggctccctcctctggcaggcttcccccttgatcgacttcttggttttctctctggatggaacgggcatgggcctctctgggggagggcgaggcccgtggggcagggctggaatgggagacctgttggcctgtgggcctcacctgcccctctgttctctcccctcacatcctcctgcccagctcctcacatacccacacattccagggctggggtgagcctgactgccaggaccccaggtcaggggctccctacattccccagagtgggatccacttcttggttcctgggatggcgatggggactctgccgctgtgtagagaccagtgggatgggctctacctctctttctcaaagagggggctctgcccacctggggtctctctccctacctccctcctcaggggcaacaacaggagaatggggttcctgctgtggggcgaattcatcccctccccgcgcgttccttcgcacactgtgattttgccctcctgcccacgcagacctgcagcgggcaaagagctcccgaggaagcacagcttgggtcaggttcttgcctttcttaattttagggacagctaccggaaggaggggaacaaggagttctcttccgcagcccctttccccacgcccacccccagtctccagggacccttgcctgcctcctaggctggaagccatggtcccgaagtgtagggcaagggtgcctcaggaccttttggtcttcagcctccctcagcccccaggatctgggttaggtggccgctcctccctgctcctcatgggaagatgtctcagagccttccatgacctcccctccccagcccaatgccaagtggacttggagctgcacaaagtcagcagggaccactaaatctccaagacctggtgtgcggaggcaggagcatgtatgtctgcaggtgtctgacacgcaagtgtgtgagtgtgagtgtgagagatggggcgggggtgtgtctgtaggtgtctctgggcctgtgtgtgggtggggttatgtgagggtatgaagagctgtcttcccctgagagtttcctcagaacccacagtgagaggggagggctcctggggcagagaagttccttaggttttctttggaatgaaattcctccttccccccatctctgagtagaggaagcccaccaatctgccctttgcagtgtgcagggtggaaggtaagaggttggtgtggagttggggctgccatagggtctgcagcctgctggggctaagcggtggaggaaggctctgtcactccaggcatatgtttccccatctctgtctggggctacagaatagggtggcagaagtgtcaccctgtgggtgtctccctcgggggctcttcccctagacctccccctcacttacataaagctcccttgaagcaagaaagagggtcccagggctgcaaaactggaagcacagcctcggggatggggagggaaagacggtgctatatccagttcctgctctctgctcatgggtggctgtgacaaccctggcctcacttgattcatctctggttttcttgccaccctctgggagtccccatcccattttcatcctgagcccaaccaggccctgccattggcctcttgtcccttggcacacttgtacccacaggtgaggggcaggacctgaaggtattggcctgttcaacaatcagtcatcatgggtgtttttgtcaactgcttgttaattgatttggggatgtttgccccgaatgagaggttgaggaaaagactgtgggtggggaggccctgcctgacccatcccttttcctttctggccccagcctaggtggaggcaagtggaatatcttatattgggcgatttgggggctcggggaggcagagaatctcttgggagtcttgggtggcgctggtgcattctgtttcctcttgatctcaaagcacaatgtggatttggggaccaaaggtcagggacacatccccttagaggacctgagtttgggagagtggtgagtggaagggaggagcagcaagaagcagcctgttttcactcagcttaattctccttcccagataaggcaagccagtcatggaatcttgctgcaggccctccctctactcttcctgtcctaaaaataggggccgttttcttacacacccccagagagaggagggactgtcacactggtgctgagtgaccgggggctgctgggcgtctgttctttaccaaaaccatccatccctagaagagcacagagccctgaggggctgggctgggctgggctgagcccctggtcttctctacagttcacagaggtctttcagctcatttaatcccaggaaagaggcatcaaagctagaatgtgaatataacttttgtggaccaatactaagaataacaagaagcccagtggtgaggaaagtgcgttctcccagcactgcctcctgttttctccctctcatgtccctccagggaaaatgactttattgcttaatttctgcctttcccccctcacacatgcacttttgggcctttttttatagctggaaaaaacaaaataccaccctacaaacctgtatttaaaaagaaacagaaatgaccacgtgaaatttgcctctgtccaaacatttcatccgtgtgtatgtgtatgtgtgtgagtgtgtgaagccgccagttcatctttttatatggggttgttgtctcattttggtctgttttggtcccctccctcgtgggcttgtgctcgggatcaaacctttctggcctgttatgattctgaacatttgacttgaaccacaagtgaatctttctcctggtgactcaaataaaagtataatttttacctgcggaaaaaaaaaaa

SEQ ID NO: 13 - DNA, 2607 bp, Homo sapiens
  misc_feature: Incyte ID No: 251906.2
gccattcgcgacccggaggtgcgcgggcgcgggcgagcagggtctccgggtgggcggcggcgacgccccgcgcaggctggaggccgccgaggctcgccatgccgggagaactctaactcccccatggagtcggccgacttctacgaggcggagccgcggcccccgatgagcagccacctgcagagccccccgcacgcgcccagcagcgccgccttcggctttccccggggcgcgggccccgcgcagcctcccgccccacctgccgccccggagccgctgggcggcatctgcgagcacgagacgtccatcgacatcagcgcctacatcgacccggccgccttcaacgacgagttcctggccgacctgttccagcacagccggcagcaggagaaggccaaggcggccgtgggccccacgggcggcggcggcggcggcgactttgactacccgggcgcgcccgcgggccccggcggcgccgtcatgcccgggggagcgcacgggcccccgcccggctacggctgcgcggccgccggctacctggacggcaggctggagcccctgtacgagcgcgtcggggcgccggcgctgcggccgctggtgatcaagcaggagccccgcgaggaggatgaagccaagcagctggcgctggccggcctcttcccttaccagccgccgccgccgccgccgccctcgcacccgcacccgcacccgccgcccgcgcacctggccgccccgcacctgcagttccagatcgcgcactgcggccagaccaccatgcacctgcagcccggtcaccccacgccgccgcccacgcccgtgcccagcccgcaccccgcgcccgcgctcggtgccgccggcctgccgggccctggcagcgcgctcaaggggctgggcgccgcgcaccccgacctccgcgcgagtggcggcacgggcgcgggcaaggccaagaagtcggtggacaagaacagcaacgagtaccgggtgcggcgcgagcgcaacaacatcgcggtgcgcaagagccgcgacaaggccaagcagcgcaacgtggagacgcagcagaaggtgctggagctgaccagtgacaatgaccgcctgcgcaagcgggtggaacagctgagccgcgaactggacacgctgcggggcatcttccgccagctgccagagagctccttggtcaaggccatgggcaactgcgcgtgaggcgcgcggctgtgggaccgccctgggccagcctccggcggggacccagggagtggtttggggtcgccggatctcgaggcttgcccgagccgtgcgagccaggactaggagattccggtgcctcctgaaagcctggcctgctccgcgtgtcccctcccttcctctgcgccggacttggtgcgtctaagatgagggggccaggcggtggcttctccctgcgaggaggggagaattcttggggctgagctgggagcccggcaactctagtatttaggataaccttgtgccttggaaatgcaaactcaccgctccaatgcctactgagtagggggagcaaatcgtgccttgtcattttatttggaggtttcctgcctccttcccgaggctacagcagacccccatgagagaaggaggggagcaggcccgtggcaggaggagggctcagggagctgagatcccgacaagcccgccagccccagccgctcctccacgcctgtccttagaaaggggtggaaacatagggacttggggcttggaacctaaggttgttcccctagttctacatgaaggtggagggtctctagttccacgcctctcccacctccctccgcacacaccccaccccagcctgctataggctgggcttccccttggggcggaactcactgcgatgggggtcaccaggtgaccagtgggagcccccaccccgagtcacaccagaaagctaggtcgtgggtcagctctgaggatgtatacccctggtgggagagggagacctagagatctggctgtggggcgggcatggggggtgaagggccactgggaccctcagccttgtttgtactgtatgccttcagcattgcctaggaacacgaagcacgatcagtccatcccagagggaccggagttatgacaagctttccaaatattttgctttatcagccgatatcaacacttgtatctggcctctgtgccccagcagtgccttgtgcaatgtgaatgtgcgcgtctctgctaaaccaccattttatttggtttttgttttgttttggttttgctcggatacttgccaaaatgagactctccgtcggcagctgggggaagggtctgagactccctttccttttggttttgggattacttttgatcctgggggaccaatgaggtgaggggggttctcctttgccctcagctttccccagcccctccggcctgggctgcccacaaggcttgtcccccagaggccctggctcctggtcgggaagggaggtggcctcccgccaacgcatcactggggctgggagcagggaaggacggcttggttctcttcttttggggagaacgtagagtctcactctagatgttttatgtattatatctataatataaacatatcaaagtcaaaaa

SEQ ID NO: 14 - DNA, 971 bp, Homo sapiens
  misc_feature: Incyte ID No: 166400.36
gggaggagggggatcagcttctgctattaccgaccccccttcatgctgcccctggcgcctagaacccttgcccctcctcatagaccaagtcccgggggtctccactcagtcctgctgcctgcttcaccagaagcagccctgtgagtgtggggtggggaagtcccttcccaacggaggtcccagcctatggccctgggcccaggtgggggtcgcctgcttccttcccggacagggtcctgcagtggccaatggtgccagagggcagctgagccaccctcgccatcagggagggtggctggccccatccccactgccacccagccccacccactgttggaagagggaccagcgcgaggtggtgcccagggtgggcactgctgcttaatgcgaggcacacctggcgcagctgagcccccaaaggctgcgggtttgccaaacacagagaggccaggccccagtgtcaggatgcagtcagcctctggcgcagctctttccacgacctggttcctggatgtcctgcttgctccacacccatctacagggaggatgtgagggggctctgcctcctagggccaggtcccccctctcgggaggaggtattgggtaggaccatccaagaaagggcagaagaccaagggcagtcggggtctagaaaggagggcgctggccctgctggacgcttcggagcccccactgtttcccactcagctttgtgctcagatcccaggtcccaaggagtgacaggggcttcctcccaccttctgtccttgtccagtcatgtaaataatgtgctttttctctccccgagtctttttttttaaacctaccgtggttcctcagctaactgcattccctacccaggcagagactgtcctatgcctcgagcttccaaacgagactcagaccgcgacacagccaccgtatttatggaatgacaaaataaataaagcccaaacccatcggtctctgtg

SEQ ID NO: 15 - DNA, 3487 bp, Homo sapiens
  misc_feature: Incyte ID No: 1354395CB1
gcagcagcagttcagaagcgagtagagacggtctctacggcagaaagtatgtcccttctctcaccatgagctggctctccagttcccagggagtggtactaacagcctaccaccccagcggcaaggaccagaccgtcgggaacagccatgcaaaggcaggggaggaagccacctcgagtcgcagatatggccagtacactatgaaccaggaaagcaccaccatcaaagttatggagaagcctccatttgatcgatcaatttcccaggattctttggatgaactatctatggaaaactattggatagaactagaaaacatcaagaaatctagtgaaaacagccaagaagatcaagaggtggttgttgtcaaagagcctgatgagggagaattggaagaagagtggcttaaagaggccggtttatccaatctcttcggagagtctgctggagatccacaggaaagcattgtgtttttatcaacattgacgcggacccaggcagcagcagttcagaagcgagtagagacggtctcccagaccttgaggaaaaaaaacaaacagtaccagattcctgacgtcagagacatatttgctcaacagagagaatcaaaagaaacagctccaggtggcactgaatcgcagtcacttagaacaaatgaaaacaaataccaaggaagagatgacgaggcatctaaccttgttggtgaagagaagctgatcccacctgaggagacgcctgcccctgaaacagacatcaacctggaggtatcatttgccgagcaagcactcaatcagaaagagagctccaaggagaaaatccagaagagcaaaggcgatgatgccacattacctagtttcagattgccaaaagacaaaacgggtaccacaaggattggtgacctcgcaccccaggacatgaagaaagtttgccatttagccctaattgagctgactgccctctatgatgtattgggtattgagctgaaacaacaaaaagctgtgaaaatcaaaacaaaagattctggtcttttttgcgttccattgacagcgctattagaacaagatcagaggaaagtaccaggaatgcgaatacccttgatctttcaaaaactgatttctcgaattgaagagagaggtttggaaacagaaggcctcttacggatccctggagctgccattagaatcaagaatctttgccaagaactagaagcaaagttttatgaagggacttttaattgggaaagtgtcaaacagcatgatgccgccagcctgctgaagctcttcattcgggagttgccccagccactgctcagtgtggagtatctcaaagcctttcaggctgtccagaatcttccaaccaagaagcagcaactacaggctttgaaccttcttgtcatcctcctacctgatgcaaacagggacacactgaaggcccttcttgaatttctccaaagagtaatagataataaagaaaaaaataaaatgacagtcatgaatgtagcaatggtcatggccccgaatctctttatgtgtcatgcattgggattgaagtccagtgaacagcgagaatttgtaatggcagctgggacagcaaataccatgcacttattgattaagtaccaaaaacttctgtggacaattcccaagtttattgtaaaccaagtgaggaagcaaaacacggaaaatcataaaaaggataaaagagccatgaagaaattgctgaagaaaatggcttatgaccgagaaaaatatgaaaagcaagataagagtacaaatgatgctgacgttcctcagggagtgattcgagtgcaagctccccatctttcgaaagtttccatggcaatacagctaactgaagaactaaaagccagtgatgtacttgccaggtttctcagccaagaaagtggggttgcccagactctcaagaaaggagaagtttttttgtatgaaattggaggaaatattggggaacgctgccttgatgatgacacttacatgaaggatttatatcagcttaacccaaatgctgagtgggttataaagtcaaagccattgtagaagacttaacaagctgcagataaccatgtggacttctgtcataattcttgctgagtcaagagtgtaaataaaagaaatggcaggactcatattattcagttgtacccaagtatttaaaaatgactctcttaagccttaaaaagtcatagatttgtgctgctgccagaattatattaattattattaatgttattattagaaaaaaaatttctggagtgagagtaaagaggcttaattagtttgtgggcagttttcatatgctctgtgaaatgtgtccagatgtgacatagtttttttttttaatatgtggaaatgtcttctcttcccattcttttctcctaaaatcatatatactgtaatatatgctctctcacctctattacctcctcacatctaccctttcccagttaggtttgctttttgaccaaaaagataacaaataccaggtatggcaagttgtgaagacagcacattaaaacatacctaatttcacagtattcctgtcacgacagaatgttagtattcatctctttgaatcatttgctcaaataataacattccaccttttcctgctgtatcacaggaagtgatttgcattttttttcagttcatctgacttatgttcacagaaccgtatcagcgaccaagaaaataggactgtcagaagctgccagttattactgaaccattaaatacttatatactaagaataaataaaatatacccatgtgaaataataattggattatggataacaagagagtgaaagccaaagcactttctgtctactgtactcttctaaatggaattttaaaagtcatagctggctttacgtgttgtcattattagcattataaatatgcatgatagtataatccagtaatggttgaagaatgtattttacttaaagagggatttttttttttaagtcctgaataagtctactggaagaattattcttctgggtgaaaaagcttttgtttgtgttcttattttaaataatcggagtcaatttattaaaatgttcttgaaagtactattcccagggattttaatgcacaaaccatattgtgacaagagatgagcctctgtactgtaaataagaaatgaagtagagaaatgttaaatattttatgagtttagaatatagtaaataaaaggtgatgtaaatgaatgctgcacaaacggtgttcatgatacttttagtagtactttaggaaaaactacacattctcagaagctcttgatgtctctaatgaagggggggaatgctgttaatgagaacagtcataaatttttagcatataattacaagaacagcctgtggatatgatcacttaaatgattttgtggtgattcgtgccattgcttttttatttaaaagaaaattttgtaattaaatgcctttttctaaattaaaaaaaaaaaaa

SEQ ID NO: 16 - DNA, 1017 bp, Homo sapiens
  misc_feature: Incyte ID No: 253541.1
gtccagttgaaatcctttcctccctctaccttggaggtgcctaccatgcatccaagtgcaagttcctcatcaagctatacatcacagcccagctgaatgtccccttgtggacctggctgtgaggcctgcaagacccacctacatacgaatggatccttgtggaataaggccacatggctgacattagctctcactttcaagaagcaatagacttcattgactgtgtcagagaaaagaaaggcaaggtcctggtccactgtgaagctgggttctcctgttcacccaccatctgcatggcttccctcataaagaccaagcacttctgcctgaaggaggccttcaattatgtcaagtggaagaggagcatgatctcacccagctttggcttcatgggccagctgtctgcggtaggaatttgaaatcctcccttccacacccaatccctagcttccctcctaccagggggaggcagcaggctcttcattgataagccatttgcagacatttagccctgacttgaagggtgtctactgcacattccctgcctcagtgctggctccagtgcccacccactggacagtctcagagctcagcaggagccctgtggccacagccacattctgctaaaactgggatagaggaacaagcccagccccaagagcagctatgacttttgtttttaagaatggacatttcacatctgtgcaatactgaagacctcactttgtcatgttgccccagtgacatagtgagaggtcaccaggcttgcaaatgaacttcacacagacctcagggtaggttctcaggattgaaggaaggccaagcaattacaggagcacagcacgtgctgactactgtacttccagaccccctgccctcaagggactgcccagtccttgcacctcaaagttcgccttttcatttcaagcataaggcaataaatacctgcagcaaacatgggagaaagaagttgctggaccaacagaaatggcacttatgaagccaattcatttgaag

SEQ ID NO: 17 - DNA, 1817 bp, Homo sapiens
  misc_feature: Incyte ID No: 1966280CB1
tccgctcaaactcagctcacttgagagtctcctcccgccagctgtggaaagaactttgcgtctctccagcaatgcatctccttgcgattctgttttgtgctctctggtctgcagtgttggccgagaactcggatgattatgatctcatgtatgtgaatttggacaacgaaatagacaatggactccatcccactgaggaccccacgccgtgcgactgcggtcaggagcactcggaatgggacaagctcttcatcatgctggagaactcgcagatgagagagcgcatgctgctgcaagccacggacgacgtcctgcggggcgagctgcagaggctgcgggaggagctgggccggctcgcggaaagcctggcgaggccgtgcgcgccgggggctcccgcagaggccaggctgaccagtgctctggacgagctgctgcaggcgacccgcgacgcgggccgcaggctggcgcgtatggagggcgcggaggcgcagcgcccagaggaggcggggcgcgccctggccgcggtgctagaggagctgcggcagacgcgagccgacctgcacgcggtgcagggctgggctgcccggagctggctgccggcaggttgtgaaacagctattttattcccaatgcgttccaagaagatttttggaagcgtgcatccagtgagaccaatgaggcttgagtcttttagtgcctgcatttgggtcaaagccacagatgtattaaacaaaaccatcctgttttcctatggcacaaagaggaatccatatgaaatccagctgtatctcagctaccaatccatagtgtttgtggtgggtggagaggagaacaaactggttgctgaagccatggtttccctgggaaggtggacccacctgtgcggcacctggaattcagaggaagggctcacatccttgtgggtaaatggtgaactggcggctaccactgttgagatggccacaggtcacattgttcctgagggaggaatcctgcagattggccaagaaaagaatggctgctgtgtgggtggtggctttgatgaaacattagccttctctgggagactcacaggcttcaatatctgggatagtgttcttagcaatgaagagataagagagaccggaggagcagagtcttgtcacatccgggggaatattgttgggtggggagtcacagagatccagccacatggaggagctcagtatgtttcataaatgttgtgaaactccacttgaagccaaagaaagaaactcacacttaaaacacatgccagttgggaaggtctgaaaactcagtgcataataggaacacttgagactaatgaaagagagagttgagaccaatctttatttgtactggccaaatactgaataaacagttgaaggaaagacattggaaaaagcttttgaggataatgttactagactttatgccatggtgctttcagtttaatgctgtgtctctgtcagataaactctcaaataattaaaaaggactgtattgttgaacagagggacaattgttttacttttctttggttaattttgttttggccagagatgaattttacattggaagaataacaaaataagatttgttgtccattgttcattgttattggtatgtaccttattacaaaaaaaatgatgaaaacatatttatactacaaggtgacttaacaactataaatgtagtttatgtgttataatcgaatgtcacgtttttgagaagatagtcatataagttatattgcaaaagggatttgtattaatttaagactatttttgtaaagctctactgtaaataaaatattt

SEQ ID NO: 18 - DNA, 5857 bp, Homo sapiens
  misc_feature: Incyte ID No: 1399416.4
  unsure 1063-1089: a, t, c, g, or other
gatttaaaagacagcgtgagactcgcgccctccggcacggaaaaggccaggcgacaggtgtcgcttgaaaagactgggcttgtccttgctggtgcatgcgtcgtcggcctctgggcagcaggtttacaaaggaggaaaacgacttcttctagatttttttttcagtttcttctataaatcaaaacatctcaaaatggagacctaaaatccttaaagggacttagtctaatctcgggaggtagttttgtgcatgggtaaacaaattaagtattaactggtgttttactatccaaagaatgctaattttataaacatgatcgagttatataaggtataccataatgagtttgattttgaatttgatttgtggaaataaaggaaaagtgattctagctggggcatattgttaaagcatttttttcagagttggccaggcagtctcctactggcacattctcccattatgtagaatagaaatagtacctgtgtttgggaaagattttaaaatgagtgacagttatttggaacaaagagctaataatcaatccactgcaaattaaagaaacatgcagatgaaagttttgacacattaaaatacttctacagtgacaaagaaaaatcaagaacaaagctttttgatatgtgcaacaaatttagaggaagtaaaaagataaatgtgatgattggtcaagaaattatccagttatttacaaggccactgatattttaaacgtccaaaagtttgtttaaatgggctgttaccgctgagaatgatgaggatgagaatgatggttgaaggttacattttaggaaatgaagaaacttagaaaattaatataaagacagtgatgaatacaaagaagatttttataacaatgtgtaaaatttttggccagggaaaggaatattgaagttagatacaattacttacctttgagggaaataattgttggtaatgagatgtgatgtttctcctgccacctggaaacaaagcattgaagtctgcagttgaaaagcccaacgtctgtgagatccaggaaaccatgcttgcaaaccactggtnnnnnnnnnnnnnnnnnnnnnnnnnnngccacagtgacttgcttattggtcattgctagtattatcgactcagaacctctttactaatggctagtaaatcataattgagaaattctgaattttgacaaggtctctgctgttgaaatggtaaatttattattttttttgtcatgataaattctggttcaaggtatgctatccatgaaataatttctgaccaaaactaaattgatgcaatttgattatccatcttagcctacagatggcatctggtaacttttgactgttttaaaaaataaatccactatcagagtagatttgatgttggcttcagaaacatttagaaaaacaaaagttcaaaaatgttttcaggaggtgataagttgaataactctacaatgttagttctttgagggggacaaaaaatttaaaatctttgaaaggtcttattttacagccatatctaaattatcttaagaaaatttttaacaaagggaatgaaatatatatcatgattctctttttccaaaagtaacctgaatatagctatgaagttcagttttgttattggtagtttgggcagagtctctttttggcagcacctgttgtctaccataattacagaggacatttccatgttctagccaagtatactattagaataaaaaaacttaacattgagttgcttcaacagcatgaaactgagtccaaaagaccaaatgaacaaacacattaatctctgattatttattttaaatagaatatttaattgtgtaagatctaatagtatcattatacttaagcaatcatattcctgatgatctatgggaaataactattatttaattaatattgaaaccaggttttaagatgtgttagccagtcctgttactagtaaatctctttatttggagagaaattttagattgttttgttctccttattagaaggattgtagaaagaaaaaaatgactaattggagaaaaatggggatatatcatatttcactgaattcaaaatgtcttcagttgtaaatcttaccattattttacgtacctctaagaaataaaagtgcttctaattaaaatatgatgtcattaattatgaaatacttcttgataacagaagttttaaaatagccatcttagaatcagtgaaatatggtaatgtattattttcctcctttgagttaggtcttgtgcttttttttcctggccactaaatttcacaatttccaaaaagcaaaataaacatattctgaatatttttgctgtgaaacacttgacagcagagctttccaccatgaaaagaagcttcatgagtcacacattacatctttgggttgattgaatgccactgaaacattctagtagcctggagaagttgacctacctgtggagatgcctgccattaaatggcatcctgatggcttaatacacatcactcttctgtgaagggttttaattttcaacacagcttactctgtagcatcatgtttacattgtatgtataaagattatacaaaggtgcaattgtgtatttcttccttaaaatgtatcagtataggatttagaatctccatgttgaaactctaaatgcatagaaataaaaataataaaaaatttttcattttggcttttcagcctagtattaaaactgataaaagcaaagccatgcacaaaactacctccctagagaaaggctagtcccttttcttccccattcatttcattatgaacatagtagaaaacagcatattcttatcaaatttgatgaaaagcgccaacacgtttgaactgaaatacgacttgtcatgtgaactgtaccgaatgtctacgtattccacttttcctgctggggttcctgtctcagaaaggagtcttgctcgtgctggtttctattacactggtgtgaatgacaaggtcaaatgcttctgttgtggcctgatgctggataactggaaaagaggagacagtcctactgaaaagcataaaaagttgtatcctagctgcagattcgttcagagtctaaattccgttaacaacttggaagctacctctcagcctacttttccttcttcagtaacaaattccacacactcattacttccgggtacagaaaacagtggatatttccgtggctcttattcaaactctccatcaaatcctgtaaactccagagcaaatcaagatttttctgccttgatgagaagttcctaccactgtgcaatgaataacgaaaatgccagattacttacttttcagacatggccattgacttttctgtcgccaacagatctggcaaaagcaggcttttactacataggacctggagacagagtggcttgctttgcctgtggtggaaaattgagcaattgggaaccgaaggataatgctatgtcagaacacctgagacattttcccaaatgcccatttatagaaaatcagcttcaagacacttcaagatacacagtttctaatctgagcatgcagacacatgcagcccgctttaaaacattctttaactggccctctagtgttctagttaatcctgagcagcttgcaagtgcgggtttttattatgtgggtaacagtgatgatgtcaaatgcttttgctgtgatggtggactcaggtgttgggaatctggagatgatccatgggttcaacatgccaagtggtttccaaggtgtgagtacttgataagaattaaaggacaggagttcatccgtcaagttcaagccagttaccctcatctacttgaacagctgctatccacatcagacagcccaggagatgaaaatgcagagtcatcaattatccattttgaacctggagaagaccattcagaagatgcaatcatgatgaatactcctgtgattaatgctgccgtggaaatgggctttagtagaagcctggtaaaacagacagttcagagaaaaatcctagcaactggagagaattatagactagtcaatgatcttgtgttagacttactcaatgcagaagatgaaataagggaagaggagagagaaagagcaactgaggaaaaagaatcaaatgatttattattaatccggaagaatagaatggcactttttcaacatttgacttgtgtaattccaatcctggatagtctactaactgccggaattattaatgaacaagaacatgatgttattaaacagaagacacagacgtctttacaagcaagagaactgattgatacgattttagtaaaaggaaatattgcagccactgtattcagaaactctctgcaagaagctgaagctgtgttatatgagcatttatttgtgcaacaggacataaaatatattcccacagaagatgtttcagatctaccagtggaagaacaattgcggagactacaagaagaaagaacatgtaaagtgtgtatggacaaagaagtgtccatagtgtttattccttgtggtcatctagtagtatgcaaagattgtgctccttctttaagaaagtgtcctatttgtaggagtacaatcaagggtacagttcgtacatttctttcatgaagaagaaccaaaacatcatctaaactttagaattaatttattaaatgtattataactttaacttttatcctaatttggtttccttaaaatttttatttatttacaactcaaaaaacattgttttgtgtaacatatttatatatgtatctaaaccatatgaacatatattttttagaaactaagagaatgataggcttttgttcttatgaacgaaaaagaggtagcactacaaacacaatattcaatcaaaatttcagcattattgaaattgtaagtgaagtaaaacttaagatatttgagttaacctttaagaattttaaatattttggcattgtactaataccgggaacatgaagccaggtgtggtggtatgtgcctgtagtcccaggctgaggcaagagaattacttgagcccaggagtttgaatccatcctgggcaggcatactgagaccctgcctttaaaaacaaacagaacaaaaacaaaacaccagggacacatttctctgtcttttttgatcagtgtcctatacatcgaaggtgtgcatatatgttgaatgacattttagggacatggtgtttttataaagaattctgtgagaaaaaatttaataaagcaacaaaaattactcttattcttcattgctttatttcaatgacattggatagtttagtcactcccagactctttccataccttcttaaagcctctcaaatattgaactacagtttatactccttcccataagatgcttcttcattgacacttgtagaacacggggtcaacacatcataaaatctattatggaatgcctgagacaagaatcaaacagtccctttagtaagtttgtttattcacttctctattgattcattcaagaagtctcatgccagccccacctattggaagaaggtctgagttttattcttatctctttggtattaattctgaaacttagaaagtacactggttagcaatgcttgggaccaacaggttgttctggtaaataaatctgtttcatattgtcagtgcaacaaaatgtccccctctgcattatgttattggtactcaacacgtccgagtcataactctgtcctttgcttcttatagaggtattaggtcttcaagagcagaagtaagactgtaatagggaatactcaggggaaggcaggcaaaggctagtcatctaaaccagttctagatgtctgtataggggcagatggctctgtaagggcagaagggaaagac

SEQ ID NO: 19 - DNA, 3229 bp, Homo sapiens
  misc_feature: Incyte ID No: 1250434CB1
acaggaggatcaccctcttcgtcgcttcggccagtgtgtcgggctgggccctgacaagccacctgaggagaggctcggagccgggcccggaccccggcgattgccgcccgcttctctctagtctcacgaggggtttcccgcctcgcacccccacctctggacttgcctttccttctcttctccgcgtgtggagggagccagcgcttaggccggagcgagcctgggggccgcccgccgtgaagacatcgcggggaccgattcaccatggagggcgccggcggcgcgaacgacaagaaaaataggataagttctgaacgtcgaaaagaaaagtctcgagatgcagccagatctcggcgaagtaaagaatctgaagttttttatgagcttgctcatcagttgccacttccacataatgtgagttcgcatcttgataaggcctctgtgatgaggcttaccatcagctatttgcgtgtgaggaaacttctggatgctggtgatttggatattgaagatgacatgaaagcacagatgaattgcttttatttgaaagccttggatggttttgttatggttctcacagatgatggtgacatgatttacatttctgataatgtgaacaaatacatgggattaactcagtttgaactaactggacacagtgtgtttgattttactcatccatgtgaccatgaggaaatgagagaaatgcttacacacagaaatggccttgtgaaaaagggtaaagaacaaaacacacagcgaagcttttttctcagaatgaagtgtaccctaactagccgaggaagaactatgaacataaagtctgcaacatggaaggtattgcactgcacaggccacattcacgtatatgataccaacagtaaccaacctcagtgtgggtataagaaaccacctatgacctgcttggtgctgatttgtgaacccattcctcacccatcaaatattgaaattcctttagatagcaagactttcctcagtcgacacagcctggatatgaaattttcttattgtgatgaaagaattaccgaattgatgggatatgagccagaagaacttttaggccgctcaatttatgaatattatcatgctttggactctgatcatctgaccaaaactcatcatgatatgtttactaaaggacaagtcaccacaggacagtacaggatgcttgccaaaagaggtggatatgtctgggttgaaactcaagcaactgtcatatataacaccaagaattctcaaccacagtgcattgtatgtgtgaattacgttgtgagtggtattattcagcacgacttgattttctcccttcaacaaacagaatgtgtccttaaaccggttgaatcttcagatatgaaaatgactcagctattcaccaaagttgaatcagaagatacaagtagcctctttgacaaacttaagaaggaacctgatgctttaactttgctggccccagccgctggagacacaatcatatctttagattttggcagcaacgacacagaaactgatgaccagcaacttgaggaagtaccattatataatgatgtaatgctcccctcacccaacgaaaaattacagaatataaatttggcaatgtctccattacccaccgctgaaacgccaaagccacttcgaagtagtgctgaccctgcactcaatcaagaagttgcattaaaattagaaccaaatccagagtcactggaactttcttttaccatgccccagattcaggatcagacacctagtccttccgatggaagcactagacaaagttcacctgagcctaatagtcccagtgaatattgtttttatgtggatagtgatatggtcaatgaattcaagttggaattggtagaaaaactttttgctgaagacacagaagcaaagaacccattttctactcaggacacagatttagacttggagatgttagctccctatatcccaatggatgatgacttccagttacgttccttcgatcagttgtcaccattagaaagcagttccgcaagccctgaaagcgcaagtcctcaaagcacagttacagtattccagcagactcaaatacaagaacctactgctaatgccaccactaccactgccaccactgatgaattaaaaacagtgacaaaagaccgtatggaagacattaaaatattgattgcatctccatctcctacccacatacataaagaaactactagtgccacatcatcaccatatagagatactcaaagtcggacagcctcaccaaacagagcaggaaaaggagtcatagaacagacagaaaaatctcatccaagaagccctaacgtgttatctgtcgctttgagtcaaagaactacagttcctgaggaagaactaaatccaaagatactagctttgcagaatgctcagagaaagcgaaaaatggaacatgatggttcactttttcaagcagtaggaattggaacattattacagcagccagacgatcatgcagctactacatcactttcttggaaacgtgtaaaaggatgcaaatctagtgaacagaatggaatggagcaaaagacaattattttaataccctctgatttagcatgtagactgctggggcaatcaatggatgaaagtggattaccacagctgaccagttatgattgtgaagttaatgctcctatacaaggcagcagaaacctactgcagggtgaagaattactcagagctttggatcaagttaactgagctttttcttaatttcattcctttttttggacactggtggctcactacctaaagcagtctatttatattttctacatctaattttagaagcctggctacaatactgcacaaacttggttagttcaatttttgatcccctttctacttaatttacattaatgctcttttttagtatgttctttaatgctggatcacagacagctcattttctcagttttttggtatttaaaccattgcattgcagtagcatcattttaaaaaatgcacctttttatttatttatttttggctagggagtttatccctttttcgaattatttttaagaagatgccaatataatttttgtaagaaggcagtaacctttcatcatgatcataggcagttgaaaaattgttaccaccgtgttttcacattgtacatattataatggcttgccggcgtacgtggtagccccatttgcccattttttgtcttgaagga

SEQ ID NO: 20 - DNA, 313 bp, Homo sapiens
  misc_feature: Incyte ID No: 1377369.2
gtgtcgctgcagcagcatgcacttcttggtagcagaatggaatgaaccatccatcaacttctataaaagaagaggtgcttctgatctgtccagtgaagagggttggagactgttcaagatcgacaaggagtacttgctttctatgctgtttgtagtgaaataatagaatgagcacccattccaaagctttattaccagtggcgttgttgcatgtttgaaatgaggtctgtttaaagtggcaatctcagatgcagtttggagagtcagatctttctccttgaatatctttcgataaacaacaaggtggtgtgat

SEQ ID NO: 21 - DNA, 1140 bp, Homo sapiens
  misc_feature: Incyte ID No: 342012CB1
aggcggaggcagctggggaggtccgagcgatgtgaccaggccgccatcgctcgtctcttcctctctcctgccgcctcctgtctcgaaaataacttttttagtctaaaaaaagaaagacaaaagtagtcgtccgcccctcacgccctctcttcctctcagccttccgcccggtgaggaagcccggggtggttgctccgccgtcggggcccgcgccgccgagccccggccgccccgggccgcccccgcacggccgcccccatgcatcccttctacacccgggccgccaccatgataggcgagatcgccgccgccgtgtccttcatctccaagtttctccgcaccaaggggctcacgagcgagcgacagctgcagaccttcagccagagcctgcaggagctgctggcagaacattataaacatcactggttcccagaaaagccatgcaagggatcgggttaccgttgtattcgcatcaaccataaaatggatcctctgattggacaggcagcacagcggattggactgagcagtcaggagctgttcaggcttctcccaagtgaactcacactctgggttgacccctatgaagtgtcctacagaattggagaggatggctccatctgtgtgctgtatgaagcctcaccagcaggaggtagcactcaaaacagcaccaacgtgcaaatggtagacagccgaatcagctgtaaggaggaacttctcttgggcagaacgagcccttccaaaaactacaatatgatgactgtatcaggttaagatatagtctgtggatggatcatctgatgatgatggataaatttgatttttgctttgggtgggctcctcttggggatggattatggaatttaaaccatgtcacagctgtgaagatctggcacaagatagaatggtaaaaaaaaaaaaaattttaagtgacagtgccatagtttggacagtacctttcaatgattaattttaatagcctgtgagtccaagtaaatgatcactttatttgctagggagggaagtcctagggtggtttcagtttctcccagacatacctaaatttttacatcaatccttttaaagaaaatctgtatttcaaagaatctttctctgcagtaaatctcgcggggaatttgc

SEQ ID NO: 22 - DNA, 3497 bp, Homo sapiens
  misc_feature: Incyte ID No: 1438184CB1
tcttccttctccagccggcaggcccgcgccgcttaggagggagagcccacccgcgccaggaggccgaacgcggactcgccacccggcttcagaatggcagaagatgatccatatttgggaaggcctgaacaaatgtttcatttggatccttctttgactcatacaatatttaatccagaagtatttcaaccacagatggcactgccaacagatggcccataccttcaaatattagagcaacctaaacagagaggatttcgtttccgttatgtatgtgaaggcccatcccatggtggactacctggtgcctctagtgaaaagaacaagaagtcttaccctcaggtcaaaatctgcaactatgtgggaccagcaaaggttattgttcagttggtcacaaatggaaaaaatatccacctgcatgcccacagcctggtgggaaaacactgtgaggatgggatctgcactgtaactgctggacccaaggacatggtggtcggcttcgcaaacctgggtatacttcatgtgacaaagaaaaaagtatttgaaacactggaagcacgaatgacagaggcgtgtataaggggctataatcctggactcttggtgcaccctgaccttgcctatttgcaagcagaaggtggaggggaccggcagctgggagatcgggaaaaagagctaatccgccaagcagctctgcagcagaccaaggagatggacctcagcgtggtgcggctcatgtttacagcttttcttccggatagcactggcagcttcacaaggcgcctggaacccgtggtatcagacgccatctatgacagtaaagcccccaatgcatccaacttgaaaattgtaagaatggacaggacagctggatgtgtgactggaggggaggaaatttatcttctttgtgacaaagttcagaaagatgacatccagattcgattttatgaagaggaagaaaatggtggagtctgggaaggatttggagatttttcccccacagatgttcatagacaatttgccattgtcttcaaaactccaaagtataaagatattaatattacaaaaccagcctctgtgtttgtccagcttcggaggaaatctgacttggaaactagtgaaccaaaacctttcctctactatcctgaaatcaaagataaagaagaagtgcagaggaaacgtcagaagctcatgcccaatttttcggatagtttcggcggtggtagtggtgccggagctggaggcggaggcatgtttggtagtggcggtggaggagggggcactggaagtacaggtccagggtatagcttcccacactatggatttcctacttatggtgggattactttccatcctggaactactaaatctaatgctgggatgaagcatggaaccatggacactgaatctaaaaaggaccctgaaggttgtgacaaaagtgatgacaaaaacactgtaaacctctttgggaaagttattgaaaccacagagcaagatcaggagcccagcgaggccaccgttgggaatggtgaggtcactctaacgtatgcaacaggaacaaaagaagagagtgctggagttcaggataacctctttctagagaaggctatgcagcttgcaaagaggcatgccaatgcccttttcgactacgcggtgacaggagacgtgaagatgctgctggccgtccagcgccatctcactgctgtgcaggatgagaatggggacagtgtcttacacttagcaatcatccaccttcattctcaacttgtgagggatctactagaagtcacatctggtttgatttctgatgacattatcaacatgagaaatgatctgtaccagacgcccttgcacttggcagtgatcactaagcaggaagatgtggtggaggatttgctgagggctggggccgacctgagccttctggaccgcttgggtaactctgttttgcacctagctgccaaagaaggacatgataaagttctcagtatcttactcaagcacaaaaaggcagcactacttcttgaccaccccaacggggacggtctgaatgccattcatctagccatgatgagcaatagcctgccatgtttgctgctgctggtggccgctggggctgacgtcaatgctcaggagcagaagtccgggcgcacagcactgcacctggctgtggagcacgacaacatctcattggcaggctgcctgctcctggagggtgatgcccatgtggacagtactacctacgatggaaccacacccctgcatatagcagctgggagagggtccaccaggctggcagctcttctcaaagcagcaggagcagatcccctggtggagaactttgagcctctctatgacctggatgactcttgggaaaatgcaggagaggatgaaggagttgtgcctggaaccacgcctctagatatggccaccagctggcaggtatttgacatattaaatgggaaaccatatgagccagagtttacatctgatgatttactagcacaaggagacatgaaacagctggctgaagatgtgaagctgcagctgtataagttactagaaattcctgatccagacaaaaactgggctactctggcgcagaaattaggtctggggatacttaataatgccttccggctgagtcctgctccttccaaaacacttatggacaactatgaggtctctgggggtacagtcagagagctggtggaggccctgagacaaatgggctacaccgaagcaattgaagtgatccaggcagcctccagcccagtgaagaccacctctcaggcccactcgctgcctctctcgcctgcctccacaaggcagcaaatagacgagctccgagacagtgacagtgtctgcgacagcggcgtggagacatccttccgcaaactcagctttaccgagtctctgaccagtggtgcctcactgctaactctcaacaaaatgccccatgattatgggcaggaaggacctctagaaggcaaaatttagcctgctgacaatttcccacaccgtgtaaaccaaagccctaaaattccactgcgttgtccacaagacagaagctgaagtgcatccaaaggtgctcagagagccggcccgcctgaatcattctcgatttaactcgagaccttttcaacttggcttcctttcttggttcataaatgaattttagtttggttcacttacagatagtatctagcaatcacaacactggctgagcggatgcatctggggatgaggttgcttactaagctttgccagctgctgctggatcacagctgctttctgttgtcattgctgttgtccctctgctacgttcctattgtcattaaaggtatcacggtcgccacctggcattccttctgaccacagcatcattttgcattcaaattaagggttaagaaaagagatattttaaaatgagagtcacttgatgtgccattttaaaaaaaaaggcatattgctttttctaatgtggttatttctca

SEQ ID NO: 23 - DNA, 2522 bp, Homo sapiens
  misc_feature: Incyte ID No: 1450758CB1
ggcaccgagacacaaaggcaggcgggatgcgggagcaggcaaagggaaagcgaaagccgcgcgcccggccggtgactgggtgaaggcgccgcgcagctttcccgacgccggctgtacccggacctcctggtcgagcctggcgcgccgcagccatggccatcgctcaactggccacggagtacgtgttctcggatttcttgctgaaggagcccacggagcccaagttcaaggggctgcgactggagctggctgtggacaagatggtcacgtgcattgcggtggggctgcccctgctgctcatctcgctggccttcgcgcaggagatctcgattggtacacagataagctgtttctctccaagttctttctcctggcgtcaggctgcctttgtggattcatattgctgggcggctgttcagcagaagaactcactgcagagcgagtctggaaacctcccactgtggctgcataagtttttcccctacatcctgctgctctttgcgatcctcctgtacctgcccccgctgttctggcgtttcgcagctgctcctcatatttgctcagacttgaagtttatcatggaagaacttgacaaagtttacaaccgtgcaattaaggctgcaaagagtgcgcgtgaccttgacatgagagatggagcctgctcagttccaggtgttaccgagaacttagggcaaagtttgtgggaggtatctgaaagccacttcaagtacccaattgtggagcagtacttgaagacaaagaaaaattctaataatttaatcatcaagtacattagctgccgcctgctgacactcatcattatactgttagcgtgtatctacctgggctattacttcagcctctcctcactctcagacgagtttgtgtgcagcatcaaatcagggatcctgagaaacgacagcaccgtgcccgatcagtttcagtgcaaactcattgccgtgggcatcttccagttgctcagtgtcattaaccttgtggtttatgtcctgctggctcccgtggttgtctacacgctgtttgttccattccgacagaagacagatgttctcaaagtgtacgaaatcctccccacttttgatgttctgcatttcaaatctgaagggtacaacgatttgagcctctacaatctcttcttggaggaaaatataagtgaggtcaagtcatacaagtgtcttaaggtactggagaatattaagagcagtggtcaggggatcgacccaatgctactcctgacaaaccttggcatgatcaagatggatgttgttgatggcaaaactcccatgtctgcagagatgagagaggagcaggggaaccagacggcagagctccaaggtatgaacatagacagtgaaactaaagcaaataatggagagaagaatgcccgacagagacttctggattcttcttgctgatgatttttttccttgagctgtaaatctgtgacttctgcgacatgggatttaatttggctaaagcacccctgttggtttcacagctggtttgcaataaatggttcttggtggagatactgagcatgtcttattgagtccctaatggaaatggtgatcaacaaaaggttatggaagaatggtttatgaacttcccataggaagcacctgagagatagtaaactgcagcaagtaactatgtgtaagtcctcatcaaatgaaaagcagaaagacaagaacaattagtcaagagcagtagccctgtcagagcctcggagcaatacctttctgtacccgtggtgagacaagacccagagctactggaaaacaagcactttggaagatttgttttgttttcatggaataataatatgtcagggtataatttaacgtgagtttcttatgtgcccttaaagactgttagacaagaaaagcattcactggctaataatccataggtcgacctatgtcctaagttaggtgtaaggtccgatgccttggcccacactcgagctctctttacattgttagttgtcaaccttggctgatggaaatcccgtaaccactatttgttgcactgtgccttgaagggcagcaggcccaagtgctgctctgactgaaaactgagttaacaagatgaaatctaaaggatattcacagtgacttcaattcaggaagaatgcttccaaaagagcccagtggggaaatctgacatcacagaagacattaattcagtcactttcaaagagtttgtctacaggcggtttctctgttatcaaaggcatttgaaataggattttacttaaacaataatggaacacaggagtatttaaagtgaagaacactttgcctgaatgtgatcagggcacataagtgacattggcatgcttcatatggcgtgcttggagccagaaaaacttagcggtttattttgtttatatttaagcacagctttaaaaaattcattatcgtttattcagtgtccgaattgaggccatttgggaagaaaattctagcactggtggagaattatagaataaagattataaatgg

SEQ ID NO: 24 - DNA, 1693 bp, Homo sapiens
  misc_feature: Incyte ID No: 1841778CB1
cttgctgcagtcacagaatggaaatctgcagaggcctccgcagtcacctaatcactctcctcctcttcctgttccattcagagacgatctgccgaccctctgggagaaaatccagcaagatgcaagccttcagaatctgggatgttaaccagaagaccttctatctgaggaacaaccaactagttgctggatacttgcaaggaccaaatgtcaatttagaagaaaagatagatgtggtacccattgagcctcatgctctgttcttgggaatccatggagggaagatgtgcctgtcctgtgtcaagtctggtgatgagaccagactccagctggaggcagttaacatcactgacctgagcgagaacagaaagcaggacaagcgcttcgccttcatccgctcagacagtggccccaccaccagttttgagtctgccgcctgccccggttggttcctctgcacagcgatggaagctgaccagcccgtcagcctcaccaatatgcctgacgaaggcgtcatggtcaccaaattctacttccaggaggacgagtagtactgcccaggcctgcctgttcccattcttgcatggcaaggactgcagggactgccagtccccctgccccagggctcccggctatgggggcactgaggaccagccattgaggggtggaccctcagaaggcgtcacaacaacctggtcacaggactctgcctcctcttcaactgaccagcctccatgctgcctccagaatggtctttctaatgtgtgaatcagagcacagcagcccctgcacaaagcccttccatgtcgcctctgcattcaggatcaaaccccgaccacctgcccaacctgctctcctcttgccactgcctcttcctccctcattccaccttcccatgccctggatccatcaggccacttgatgacccccaaccaagtggctcccacaccctgttttacaaaaaagaaaagaccagtccatgagggaggtttttaagggtttgtggaaaatgaaaattaggatttcatgatttttttttttttcagtccccgtgaaggagagcccttcatttggagattatgttctttcggggagaggctgaggacttaaaatattcctgcatttgtgaaatgatggtgaaagtaagtggtagcttttcccttctttttcttctttttttgtgatgtcccaacttgtaaaaattaaaagttatggtactatgttagccccataattttttttttccttttaaaacacttccataatctggactcctctgtccaggcactgctgcccagcctccaagctccatctccactccagattttttacagctgcctgcagtactttacctcctatcagaagtttctcagctcccaaggctctgagcaaatgtggctcctgggggttctttcttcctctgctgaaggaataaattgctccttgacattgtagagcttctggcacttggagacttgtatgaaagatggctgtgcctctgcctgtctcccccaccgggctgggagctctgcagagcaggaaacatgactcgtatatgtctcaggtccctgcagggccaagcacctagcctcgctcttggcaggtactcagcgaatgaatgctgtatatgttgggtgcaaagttccctacttcctgtgacttcagctctgttttacaataaaatcttgaaaat

SEQ ID NO: 25 - DNA, 4365 bp, Homo sapiens
  misc_feature: Incyte ID No: 2814863CB1
cgccgaccgagcagtgacttaagcaacggagcgcggtgaagctcatttttctccttcctcgcagccgcgccagggagctcgcggcgcgcggcccctgtcctccggcccgagatgaatcctgcggcagaagccgagttcaacatcctcctggccaccgactcctacaaggttactcactataaacaatatccacccaacacaagcaaagtttattcctactttgaatgccgtgaaaagaagacagaaaactccaaattaaggaaggtgaaatatgaggaaacagtattttatgggttgcagtacattcttaataagtacttaaaaggtaaagtagtaaccaaagagaaaatccaggaagccaaagatgtctacaaagaacatttccaagatgatgtctttaatgaaaagggatggaactacattcttgagaagtatgatgggcatcttccaatagaaataaaagctgttcctgagggctttgtcattcccagaggaaatgttctcttcacggtggaaaacacagatccagagtgttactggcttacaaattggattgagactattcttgttcagtcctggtatccaatcacagtggccacaaattctagagagcagaagaaaatattggccaaatatttgttagaaacttctggtaacttagatggtctggaatacaagttacatgattttggctacagaggagtctcttcccaagagactgctggcataggagcatctgctcacttggttaacttcaaaggaacagatacagtagcaggacttgctctaattaaaaaatattatggaacgaaagatcctgttccaggctattctgttccagcagcagaacacagtaccataacagcttgggggaaagaccatgaaaaagatgcttttgaacatattgtaacacagttttcatcagtgcctgtatctgtggtcagcgatagctatgacatttataatgcgtgtgagaaaatatggggtgaagatctaagacatttaatagtatcgagaagtacacaggcaccactaataatcagacctgattctggaaaccctcttgacactgtgttaaaggttttggagattttaggtaagaagtttcctgttactgagaactcaaagggttacaagttgctgccaccttatcttagagttattcaaggggatggagtagatattaataccttacaagagattgtagaaggcatgaaacaaaaaatgtggagtattgaaaatattgccttcggttctggtggaggtttgctacagaagttgacaagagatctcttgaattgttccttcaagtgtagctatgttgtaactaatggccttgggattaacgtcttcaaggacccagttgctgatcccaacaaaaggtccaaaaagggccgattatctttacataggacgccagcagggaattttgttacactggaggaaggaaaaggagaccttgaggaatatggtcaggatcttctccatactgtcttcaagaatggcaaggtgacaaaaagctattcatttgatgaaataagaaaaaatgcacagctgaatattgaactggaagcagcacatcattaggctttatgactgggtgtgtgttgtgtgtatgtaatacataatgtttattgtacagatgtgtggggtttgtgttttatgatacattacagccaaattatttgttggtttatggacatactgccctttcattttttttcttttccagtgtttaggtgatctcaaattaggaaatgcatttaaccatgtaaaagatgagtgctaaagtaagctttttagggccctttgccaataggtagtcattcaatctggtattgatcttttcacaaataacagaactgagaaacttttatatataactgatgatcacataaaacagatttgcataaaattaccatgattgctttatgtttatatttaacttgtatttttgtacaaacaagattgtgtaagatatatttgaagtttcagtgatttaacagtctttccaacttttcatgatttttatgagcacagactttcaagaaaatacttgaaaataaattacattgccttttgtccattaatcagcaaataaaacatggccttaacaaagttgtttgtgttattgtacaatttgaaaattatgtcgggacataccctatagaattactaaccttactgccccttgtagaatatgtattaatcattctacattaaagaaaataatggttcttactggaatgtctaggcactgtacagttattatatatcttggttgttgtattgtaccagtgaaatgccaaatttgaaaggcctgtactgcaattttatatgtcagagattgcctgtggctctaatatgcacctcaagattttaaggagataatgtttttagagagaatttctgcttccactatagaatatatacataaatgtaaaatacttacaaaagtggaagtagtgtattttaaagtaattacacttctgaatttatttttcatattctatagttggtatgacttaaatgaattactggagtgggtagtgagtgtacttaaatgtttcaattctgttatattttttattaagtttttaaaaaattaaattggatattaaattgtatggacatcatttattaattttaaactgaatgccctcaataagtaatactgaagcacattcttaaatgaagataaattatctccaatgaaaagcatgacatgtgtttcaatagaagaatcttaagttggctaaattcaaagtgcttgacatcaaaatgttctagagtgattagctactagattctgaatcatacatcacatctgactagagaccagtttctttcgaatgattcttttatgtatgtagatctgttcttctgaggcagcggttggccaactatagcccaaaggccaaatttggacttctttttataaatgcagattgtctatggctgctttcccactactccagcctaaggtaaacagctgcaatagaagccaaatgagaatcgcaaagcccaaaatgtttattaacctgccctttacacaaaattacacaaaaagtttcctgatctctgttctaagaaaaggagtgtgccttgcatttaaaaggaaatgttggtttctagggaagggaggaggctaaataattgatacggaattttcctcttttgtcttcttttttctcacttaagaatccgatactggaagactgatttagaaaagtttttaacatgacattaaatgtgaaattttaaaaattgaaaagccataaatcatctgttttaaatagttacatgagaaaatgatcactagaataacctaattagaagtgttatcttcattaaatgttttttgtaagtggtattagaaagaatatgtttttcagatggttctttaaacatgtagtgagaacaataagcattattcacttttagtaagtcttctgtaatccatgatataaaataattttaaaatgattttttaatgtatttgagtaaagatgagtagtattaagaaaaacacacatttcttcacaaaatgtgctaaggggcgtgtaaagaatcaaaagaaactattaccaataatagttttgataatcacccataattttgtgtttaaacattgaaattatagtacagacagtattctctgtgttctgtgaatttcagcagcttcagaatagagtttaatttagaaatttgcagtgaaaaaagctatctctttgttcacaaccataaatcaggagatggagattaattctattggctcttagtcacttggaactgattaattctgactttctgtcactaagcacttggtatttggccatctccattctgagcaccaaacggttaacacgaatgtccactagaactctgctgtgtgtcacccttaaatcagtctaaatcttccagacaaaagcaaatggcatttatggatttaagtcattagattttcaactgacattaattaatccctcttgattgattatatcatcaagtatttatatcttaaataggaggtaggatttctgtgttaagactcttatttgtaccctataattaaagtaaaatgttttttatgagtatcccttgttttcccttcttaaattgttatcaaacaatttttataatgaaatctatcttggaaaattagaaagaaaaatggcaaggtatttattgttctgtttgccataatttagaactcacacttaagtattttgtagttttacattcctttttaacccattcagtggagaatgtcagcttttctcccaagttgtatgttaagtctattctaatatgtactcaacatcaagttataaacatgtaataaacatggaaataaagtttagc

SEQ ID NO: 26 - DNA, 2725 bp, Homo sapiens
  misc_feature: Incyte ID No: 1218366CB1
cccagctgctgagaggagttgcctgagagtgacctttgcatctgcctgtccagccagcatggaaccaaagcggatcagagagggctaccttgtgaagaaggggagcgtgttcaatacgtggaaacccatgtgggttgtattgttagaagatggaattgaattctataagaagaaaagtgacaacagccccaaaggaatgatcccgctgaaagggagcactctgactagcccttgtcaagactttggcaaaaggatgtttgtgtttaagatcactacgaccaaacagcaggaccacttcttccaggcagccttcctggaggagagagatgcctgggttcgggatatcaagaaggccattaaatgcattgaaggaggccagaaatttgccaggaaatctaccaggaggtccattcgactgccagaaaccattgacttaggtgccttatatttgtccatgaaagacactgaaaaaggaataaaagaactgaatctagagaaggacaagaagatttttaatcactgcttcacaggtaactgcgtcattgattggctggtatccaaccagtctgttaggaatcgccaggaaggcctcatgattgcttcatcactgctcaatgaggggtatctgcagcctgctggagacatgtccaagagtgcagtggatggaactgctgaaaaccctttcctggacaaccctgatgccttctactactttccagacagtgggttcttctgtgaagagaattccagtgatgatgatgtgattctgaaagaagaattcagaggggtcattatcaagcagggatgtttactgaagcaggggcatagaaggaaaaactggaaagtgaggaagttcatcttgagagaagaccctgcctacctgcactactatgaccctgctggggcagaagatcccctgggagcaattcacttgagaggctgtgtggtgacttcagtggagagcaactcaaatggcaggaagagtgaggaagagaacctttttgagatcatcacagcagatgaagtgcactatttcttgcaagcagccacccccaaggagcgcacagagtggatcaaagccatccagatggcctcccgaactgggaagtaaagacactcctgcattcctcctcccctcctgagggaagcccatggacaagctcagtccaggacctgtccacttctgtgacaaatcaacgggaaacagcccaggggtgggaagttttcatttgcaggggggtctgaatgtaactcaccatgtggtgtgcaaggttcccctgcattgtattgctcactgcagcccctctgcccctatccatgacccccaagcagatataacaagctgtgcagcctcagtaggctgcttgccctctccaggcctcagggcctcttctggaaaatgaagaaattcaactagtagattcctgaggtctccccagcttaaaaaaaaaaaatctgccccgtgattctaacactcgcagtagtgatagtgtatctagttgttctgctggtgtccttccttggctaagtcttggccttcagttatcttcaaatgtaccagaacctgagccaacgcctccctgtgaaactgttgctgatctgtagtacagtaccaggaagaaacctcttttgttctctttagacatcttctacttgctcttggccttgagatcgtgtaacaaaatgaaggagggctctcttctttcttcctcatcctactcaaaaacttcccgagagcagtggtggttttgagggttttgacttctattacttttggcagcctggaaagttgtgtcttctgggaaagagacccggggaggccaggagtagctgagggtcctttctgtgcccttaaaccgcccagaggagccctattccactctggttttaggctgatctgagagggtctccctttgttcctttctggagcatttctctaacgtttattacaattaggagggggaccccacatctgtgagattctgtttcatttgaggtttacagaaaaaaaaagtggccagatgtgttccccccatgggtgagaggcctgggcaactgcctggtgaatgtgtcttgcggcagctgcagcaagtggaggggctgaactactggccagctcactggatgatgggttaatacaacaactgcactgtaaggactcagagccacacagaacttctgagaggggctgttagcattgcgcagcatcttcagttctccagtaaatgatattgcgttcgtgcctcagctttaagcacaagtagcagcagctcctgcttgagttctgagggcatcatggccctatgattaaccagagtgatctaacctagactaaaattgggaacttatttgcaatttttgaccctgaccactaactagtgattcttctccaaaattgagaaagacagcacccattgaaacagatatgtgtgtgaaagtatatttttcaattccagatttttaattttaaggctccaggaaagaaaggagagtagaacatttttcctcattttatcaaatcctctcttgccctccctcaattcccctgtaacattcctgaagctgttcccactcccagatggttttatcaatagcctagaggtaaagaactgtctttttctctgattctttaataaattatctttatagaatatgcacaagtttttctacactcagtgttaaagtatttattaatgggaagtcaacttaatgttttgaaataaat

SEQ ID NO: 27 - DNA, 1667 bp, Homo sapiens
  misc_feature: Incyte ID No: 2483854CB1
gtcatttcattggcgtttgagtcagcaaagaagtcaagatggccaaagttccagacatgtttgaagacctgaagaactgttacagtgaaaatgaagaagacagttcctccattgatcatctgtctctgaatcagaaatccttctatcatgtaagctatggcccactccatgaaggctgcatggatcaatctgtgtctctgagtatctctgaaacctctaaaacatccaagcttaccttcaaggagagcatggtggtagtagcaaccaacgggaaggttctgaagaagagacggttgagtttaagccaatccatcactgatgatgacctggaggccatcgccaatgactcagaggaagaaatcatcaagcctaggtcagcaccttttagcttcctgagcaatgtgaaatacaactttatgaggatcatcaaatacgaattcatcctgaatgacgccctcaatcaaagtataattcgagccaatgatcagtacctcacggctgctgcattacataatctggatgaagcagtgaaatttgacatgggtgcttataagtcatcaaaggatgatgctaaaattaccgtgattctaagaatctcaaaaactcaattgtatgtgactgcccaagatgaagaccaaccagtgctgctgaaggagatgcctgagatacccaaaaccatcacaggtagtgagaccaacctcctcttcttctgggaaactcacggcactaagaactatttcacatcagttgcccatccaaacttgtttattgccacaaagcaagactactgggtgtgcttggcaggggggccaccctctatcactgactttcagatactggaaaaccaggcgtaggtctggagtctcacttgtctcacttgtgcagtgttgacagttcatatgtaccatgtacatgaagaagctaaatcctttactgttagtcatttgctgagcatgtactgagccttgtaattctaaatgaatgtttacactctttgtaagagtggaaccaacactaacatataatgttgttatttaaagaacaccctatattttgcatagtaccaatcattttaattattattcttcataacaattttaggaggaccagagctactgactatggctaccaaaaagactctacccatattacagatgggcaaattaaggcataagaaaactaagaaatatgcacaatagcagttgaaacaagaagccacagacctaggatttcatgatttcatttcaactgtttgccttctacttttaagttgctgatgaactcttaatcaaatagcataagtttctgggacctcagttttatcattttcaaaatggagggaataatacctaagccttcctgccgcaacagttttttatgctaatcagggagggcattttggtaaaatacttcttgaagccgagcctcaagatgaaggcaaagcacgaaatgttattttttaattattatttatatatgtatttataaatatatttcagataattataatatacctatattgatgggaacccttcatcctctgaggtgtgaccagggcatcctccacaattagccgacagtggtttcctggggataggtaaggtttggtttccattaataccagggcattttgggtccaagttgtgcttaatcccataagccaggga

SEQ ID NO: 28 - DNA, 2875 bp, Homo sapiens
  misc_feature: Incyte ID No: 1842870CB1
ccttccagtaaggagtcggggtcttccccagttttctcagccaggcggcggcggcgactggcaatgtttggcctcaaaagaaacgcggtaatcggactcaacctctactgtgggggggccggcttgggggccggcagcggcggcgccacccgcccgggagggcgacttttggctacggagaaggaggcctcggcccggcgagagatagggggaggggaggccggcgcggtgattggcggaagcgccggcgcaagccccccgtccaccctcacgccagactcccggaggttcgcgcggccgccgcccattggcgccgaggtccccgacgtcaccgcgacccccgcgaggctgcttttcttcgcgcccacccgccgcgcggcgccgcttgaggagatggaagccccggccgctgacgccatcatgtcgcccgaagaggagctggacgggtacgagccggagcctctcgggaagcggccggctgtcctgccgctgctggagttggtcggggaatctggtaataacaccagtacggacgggtcactaccctcgacgccgccgccagcagaggaggaggaggacgagttgtaccggcagtcgctggagattatctctcggtaccttcgggagcaggccaccggcgccaaggacacaaagccaatgggcaggtctggggccaccagcaggaaggcgctggagaccttacgacgggttggggatggcgtgcagcgcaaccacgagacggccttccaaggcatgcttcggaaactggacatcaaaaacgaagacgatgtgaaatcgttgtctcgagtgatgatccatgttttcagcgacggcgtaacaaactggggcaggattgtgactctcatttcttttggtgcctttgtggctaaacacttgaagaccataaaccaagaaagctgcatcgaaccattagcagaaagtatcacagacgttctcgtaaggacaaaacgggactggctagttaaacaaagaggctgggatgggtttgtggagttcttccatgtagaggacctagaaggtggcatcaggaatgtgctgctggcttttgcaggtgttgctggagtaggagctggtttggcatatctaataagatagccttactgtaagtgcaatagttgacttttaaccaaccaccaccaccaccaaaaccagtttatgcagttggactccaagctgtaacttcctagagttgcaccctagcaacctagccagaaaagcaagtggcaagaggattatggctaacaagaataaatacatgggaagagtgctccccattgattgaagagtcactgtctgaaagaagcaaagttcagtttcagcaacaaacaaactttgtttgggaagctatggaggaggacttttagatttagtgaagatggtagggtggaaagacttaatttccttgttgagaacaggaaagtggccagtagccaggcaagtcatagaattgattacccgccgaattcattaatttactgtagtgttaagagaagcactaagaatgccagtgacctgtgtaaaagttacaagtaatagaactatgactgtaagcctcagtactgtacaagggaagcttttcctctctctaattagctttcccagtatacttcttagaaagtccaagtgttcaggacttttatacctgttatactttggcttggtttccatgattcttactttattagcctagtttatcaccaataatacttgacggaaggctcagtaattagttatgaatatggatatcctcaattcttaagacagcttgtaaatgtatttgtaaaaattgtatatatttttacagaaagtctatttctttgaaacgaaggaagtatcgaatttacattagtttttttcatacccttttgaactttgcaacttccgtaattaggaacctgtttcttacagcttttctatgctaaactttgttctgttcagttctagagtgtatacagaacgaattgatgtgtaactgtatgcagactggttgtagtggaacaaatctgataactatgcaggtttaaattttcttatctgattttggtaagtattccttagataggtttttctttgaaaacctgggattgagaggttgatgaatggaaattctttcacttcattatatgcaagttttcaataattaggtctaagtggagttttaaggttactgatgacttacaaataatgggctctgattgggcaatactcatttgagttccttccatttgacctaatttaactggtgaaatttaaagtgaattcatgggctcatctttaaagcttttactaaaagattttcagctgaatggaactcattagctgtgtgcatataaaaagatcacatcaggtggatggagagacatttgatcccttgtttgcttaataaattataaaatgatggcttggaaaagcaggctagtctaaccatggtgctattattaggcttgcttgttacacacacaggtctaagcctagtatgtcaataaagcaaatacttactgttttgtttctattaatgattcccaaaccttgttgcaagtttttgcattggcatctttggatttcagtcttgatgtttgttctatcagacttaaccttttatttcctgtccttccttgaaattgctgattgttctgctccctctacagatatttatatcaattcctacagctttcccctgccatccctgaactctttctagcccttttagattttggcactgtgaaacccctgctggaaacctgagtgaccctccctccccaccaagagtccacagacctttcatctttcacgaacttgatcctgttagcaggtggtaataccatgggtgctgtgacactaacagtcattgaga

SEQ ID NO: 29 - DNA, 952 bp, Homo sapiens
  misc_feature: Incyte ID No: 235631.1
ccatatacacacacttttatacgtgtgtgtgtgggggagggggtggggcatggctgctcgcgcgtgcctgtatgggtctgtgtatgttgcatgtgtatgttgggagcatgaagggaaatgtatgtcccggtgtgtcctccgcacattcctgagacctgtctcaggtcaggaggactggctgaggagtcctcttgtctcggccagcccatggggtctccacccgctgctgctccagctctccggggctgggctggaaaggcctcaccgcccctctgttccctccagggtggccctgtggagatcttgccctacctgttcctgggcagctgcagtcactcgtcagacctgcaggggctgcaggcctgtggcatcacagccgtcctcaacgtgtccgccagctgccccaaccactttgagggccttttccgctacaagagtatccctgtggaggacaaccagatggtggagatcagtgcctggttccaggaggccataggcttcattggtaagggggcacctctgcccagaaatcccgaggggctccagaggagaggactgggggcacctgtctcctgggctgtgcacattccgtctgacaccactcccccatctcccttgcagactgggtgaagaacagcggaggccgggtgctggtgcactgccaggcgggtatctcgcgctctgccaccatctgtctggcatacctcatgcagagtcgccgtgtgcggctggacgaggcctttgacttcgttaagcagcgccggggggtcatctcccccaacttcagtttcatggggcagctgctgcagtttgagacccaggtgctgtgtcactgaggtggtgcccctctgcctgcctgccccactgtgctggcaggagctgactgtggactggtgggctcccctctgggccagcacagtcccctcacctctggcagggctgctacctcctc

SEQ ID NO: 30 - DNA, 2114 bp, Homo sapiens
  misc_feature: Incyte ID No: 156986CB1
gttcctcgtctgccagccggcttggctagcgcgcggcggccgtggctaaggctgctacgaagcgagcttgggaggagcagcggcctgcggggcagaggagcatcccgtctaccaggtcccaagcggcgtggcccgcgggtcatggccaaaggagaaggcgccgagagcggctccgcggcggggctgctacccaccagcatcctccaaagcactgaacgcccggcccaggtgaagaaagaaccgaaaaagaagaaacaacagttgtctgtttgcaacaagctttgctatgcacttgggggagccccctaccaggtgacgggctgtgccctgggtttcttccttcagatctacctattggatgtggctcaggtgggccctttctctgcctccatcatcctgtttgtgggccgagcctgggatgccatcacagaccccctggtgggcctctgcatcagcaaatccccctggacctgcctgggtcgccttatgccctggatcatcttctccacgcccctggccgtcattgcctacttcctcatctggttcgtgcccgacttcccacacggccagacctattggtacctgcttttctattgcctctttgaaacaatggtcacgtgtttccatgttccctactcggctctcaccatgttcatcagcaccgagcagactgagcgggattctgccaccgcctatcggatgactgtggaagtgctgggcacagtgctgggcacggcgatccagggacaaatcgtgggccaagcagacacgccttgtttccaggacctcaatagctctacagtagcttcacaaagtgccaaccatacacatggcaccacctcacacagggaaacgcaaaaggcatacctgctggcagcgggggtcattgtctgtatctatataatctgtgctgtcatcctgatcctgggcgtgcgggagcagagagaaccctatgaagcccagcagtctgagccaatcgcctacttccggggcctacggctggtcatgagccacggcccatacatcaaacttattactggcttcctcttcacctccttggctttcatgctggtggaggggaactttgtcttgttttgcacctacaccttgggcttccgcaatgaattccagaatctactcctggccatcatgctctcggccactttaaccattcccatctggcagtggttcttgacccggtttggcaagaagacagctgtatatgttgggatctcatcagcagtgccatttctcatcttggtggccctcatggagagtaacctcatcattacatatgcggtagctgtggcagctggcatcagtgtggcagctgccttcttactaccctggtccatgctgcctgatgtcattgacgacttccatctgaagcagccccacttccatggaaccgagcccatcttcttctccttctatgtcttcttcaccaagtttgcctctggagtgtcactgggcatttctaccctcagtctggactttgcagggtaccagacccgtggctgctcgcagccggaacgtgtcaagtttacactgaacatgctcgtgaccatggctcccatagttctcatcctgctgggcctgctgctcttcaaaatgtaccccattgatgaggagaggcggcggcagaataagaaggccctgcaggcactgagggacgaggccagcagctctggctgctcagaaacagactccacagagctggctagcatcctctagggcccgccacgttgcccgaagccaccatgcagaaggccacagaagggatcaggacctgtctgccggcttgctgagcagctggactgcaggtgctaggaagggaactgaagactcaaggaggtggcccaggacacttgctgtgctcactgtggggccggctgctctgtggcctcctgcctcccctctgcctgcctgtggggccaagccctggggctgccactgtgaatatgccaaggactgatcgggcctagcccggaacactaatgtagaaacctttttttttacagagcctaattaataacttaatgactgtgtacatagcaatgtgtgtgtatgtatatgtctgtgagctattaatgttattaattttcataaaagct

SEQ ID NO: 31 - DNA, 3851 bp, Homo sapiens
  misc_feature: Incyte ID No: 1136056.2
cattcataagactcagagctacggccacggcagggacacgcggaaccaagacttggaaacttgattgttgtggttcttcttgggggttatgaaatttcattaatcttttttttttccggggagaaagtttttggaaagattcttccagatatttcttcattttcttttggaggaccgacttactttttttggtcttctttattactcccctccccccggtgggacccgccggacgcgtggaggagaccgtagctgaagctgattctgtacagcgggacagcgctttctgcccctgggggagcaacccctccctcgcccctgggtcctacggagcctgcactttcaagaggtacagcggcatcctgtgggggcctgggcaccgcaggaagactgcacagaaactttgccattgttggaacgggacgttgctccttccccgagcttccccggacagcgtactttgaggactcgctcagctcaccggggactcccacggctcaccccggacttgcaccttacttccccaacccggccatagccttggcttcccggcgacctcagcgtggtcacaggggcccccctgtgcccagggaaatgtttcaggctttccccggagactacgactccggctcccggtgcagctcctcaccctctgccgagtctcaatatctgtcttcggtggactccttcggcagtccacccaccgccgccgcctcccaggagtgcgccggtctcggggaaatgcccggttccttcgtgcccacggtcaccgcgatcacaaccagccaggacctccagtggcttgtgcaacccaccctcatctcttccatggcccagtcccaggggcagccactggcctcccagcccccggtcgtcgacccctacgacatgccgggaaccagctactccacaccaggcatgagtggctacagcagtggcggagcgagtggcagtggtgggccttccaccagcggaactaccagtgggcctgggcctgcccgcccagcccgagcccggcctaggagaccccgagaggagacgctcaccccagaggaagaggagaagcgaagggtgcgccgggaacgaaataaactagcagcagctaaatgcaggaaccggcggagggagctgaccgaccgactccaggcggagacagatcagttggaggaagaaaaagcagagctggagtcggagatcgccgagctccaaaaggagaaggaacgtctggagtttgtgctggtggcccacaaaccgggctgcaagatcccctacgaagaggggcccgggccgggcccgctggcggaggtgagagatttgccgggctcagcaccggctaaggaagatggcttcagctggctgctgccgcccccgccaccaccgcccctgcccttccagaccagccaagacgcaccccccaacctgacggcttctctctttacacacagtgaagttcaagtcctcggcgaccccttccccgttgttaacccttcgtacacttcttcgtttgtcctcacctgcccggaggtctccgcgttcgccggcgcccaacgcaccagcggcagtgaccagccttccgatcccctgaactcgccctccctcctcgctctgtgaactctttagacacacaaaacaaacaaacacatgggggagagagacttggaagaggaggaggaggaggagaaggaggagagagaggggaagagacaaagtgggtgtgtggcctccctggctcctccgtctgaccctctgcggccactgcgccactgccatcggacaggaggattccttgtgttttgtcctgcctcttgtttctgtgccccggcgaggccggagagctggtgactttggggacagggggtgggaaggggatggacacccccagctgactgttggctctctgacgtcaacccaagctctggggatgggtggggaggggggcgggtgacgcccaccttcgggcagtcctgtgtgaggattaagggacgggggtgggaggtaggctgtggggtgggctggagtcctctccagagaggctcaacaaggaaaaatgccactccctacccaatgtctcccacacccaccctttttttggggtgcctaggttggtttcccctgcactcccgaccttagcttattgatcccacatttccatggtgtgagatcctctttactctgggcagaagtgagccccccccttaaagggaattcgatgcccccctagaataatctcatccccccacccgacttcttttgaaatgtgaacgtccttccttgactgtctagccactccctcccagaaaaactggctctgattggaatttctggcctcctaaggctccccaccccgaaatcagcccccagccttgtttctgatgacagtgttatcccaagaccctgccccctgccagccgaccctcctggccttcctcgttgggccgctctgatttcaggcagcaggggctgctgtgatgccgtcctgctggagtgatttatactgtgaaatgagttggccagattgtggggtgcagctgggtggggcagcacacctctggggggataatgtccccactcccgaaagcctttcctcggtctcccttccgtccatcccccttcttcctcccctcaacagtgagttagactcaagggggtgacagaaccgagaagggggtgacagtcctccatccacgtggcctctctctctctcctcaggaccctcagccctggcctttttctttaaggtcccccgaccaatccccagcctaggacgccaacttctcccaccccttggcccctcacatcctctccaggaagggagtgaggggctgtgacatttttccggagaagatttcagagctgaggctttggtacccccaaacccccaatatttttggactggcagactcaaggggctggaatctcatgattccatgcccgagtccgcccatccctgaccatggttttggctctcccaccccgccgttccctgcgcttcatctcatgaggatttctttatgaggcaaatttatattttttaatatcggggggtggaccacgccgccctccatccgtgctgcatgaaaaacattccacgtgccccttgtcgcgcgtctcccatcctgatcccagacccattccttagctatttatccctttcctggtttccgaaaggcaattatatctattatgtataagtaaatatattatatatggatgtgtgtgtgtgcgtgcgcgtgagtgtgtgagcgcttctgcagcctcggcctaggtcacgttggccctcaaagcgagccgttgaattggaaactgcttctagaaactctggctcagcctgtctcgggctgacccttttctgatcgtctcggcccctctgattgttcccgatggtctctctccctctgtcttttctcctccgcctgtgtccatctgaccgttttcacttgtctcctttctgactgtccctgccaatgctccagctgtcgtctgactctgggttcgttggggacatgagattttattttttgtgagtgagactgagggatcgtagatttttacaatctgtatctttgacaattctgggtgcgagtgtgagagtgtgagcagggcttgctcctgccaaccacaattcaatgaatccccgacccccctaccccatgctgtacttgtggttctctttttgtattttgcatctgaccccggggggctgggacagattggcgatgggccgtcccctctccccttggttctgcactgttgccaataaaaagctcttaaaaacggctaaaaaaaatctatgtcggtgcggagaaagaggtaatgaaatggcaggaattcgatatcagcttatcataccg

SEQ ID NO: 32 - DNA, 961 bp, Homo sapiens
  misc_feature: Incyte ID No: 3732868CB1
  unsure 19: a, t, c, g, or other
ctggctctgaccgcgctgncctgggcccgagagcccaggaggcgtgtctcagagaaaagatataagcggcccccggacgctaaagcggtgccagcggcggagtctccaactgggagagctgcagctgccgagaggaggagaacgctgaggtcggtcggaccaacggacgcgctgaccgctgccaactgcagctcgcgctgcctcctgctcgcgccgtgccactaaggtcactcccgcctccgagagcccagagccgagatggaaacggtccaggagctgatccccctggccaaggagatgatggcccagaagcgcaaggggaagatggtgaagctgtacgtgctgggcagcgtgctggccctcttcggcgtggtgctcggcctgatggagactgtgtgcagccccttcacggccgccagacgtctgcgggaccaggaggcagccgtggcggagctgcaggccgccctggagcgacaggctctccagaagcaagccctgcaggagaaaggcaagcagcaggacacggtcctcggcggccgggccctgtccaaccggcagcacgcctcctaggaactgtgggagaccagcggagtgggagggagacgcagtagacagagacagaccgagaaggaagggagagacagagggggcgcgcgcacaggagcctgactccgctgggagagtgcaggagcacgtgctgttttttatttggacttaacttcagagaaaccgctgacatctagaactgacctaccacaagcatccaccaaaggagtttgggattgagttttgctgctgtgcagcactgcattgtcatgacatttccaacactgtgtgaattatctaaatgcgtctaccattttgcactagggaggaaggataaatgctttttatgttattattattaattattacaatgaccaccattttgcattttgaaataaaaaactttttataccat

SEQ ID NO: 33 - DNA, 2097 bp, Homo sapiens
  misc_feature: Incyte ID No: 1528186CB1
cgggagagctctggacagtttgagcagcattgttagagcctgtggaaaacactttacaactgtgtaactgtcttcatctttacagaggaatagtctacaaaggaagacttgtaacctggagaagagacctgtcatttactccatcctttatagtgatgctacaggacgaagaggaatggataaaaacattggcgagcaactcaataaagcgtatgaagccttccggcaggcatgcatggatagagattctgcagtaaaagaattacagcaaaagactgagaactatgagcagagaatacgtgaacaacaggaacagctgtcacttcaacagactattattgacaagctaaaatctcagttacttcttgtgaattccactcaagataacaattatggctgtgttcctctgcttgaagacagtgaaacaagaaagaataatttgactcttgatcagccacaagataaagtgatttcaggaatagcaagagaaaaactaccaaaggtaagaagacaagaggtttcttctcctagaaaagaaacttcagcaaggagtcttggcagtcctttgctccatgaaaggggtaatatagagaagactttctgggatctgaaagaagaatttcataaaatatgcatgctagcaaaagcacagaaagaccacttaagcaaacttaatataccagacactgcaactgaaacacagtgctctgtgcctatacagtgtacggataaaacagataaacaagaagcgctgtttaagcctcaggctaaagatgatataaatagaggtgcaccatccatcacatctgtcacaccaagaggactgtgcagagatgaggaagacacctcttttgaatcactttctaaattcaatgtcaagtttccacctatggacaatgactcaactttcttacatagcactccagagagacccggcatccttagtcctgccacgtctgaggcagtgtgccaagagaaatttaatatggagttcagagacaacccagggaactttgttaaaacagaagaaactttatttgaaattcagggaattgaccccatagcttcagctatacaaaaccttaaaacaactgacaaaacaaagccctcaaatctcgtaaacacttgtatcaggacaactctggatagagctgcgtgtttgccacctggagaccataatgcattatatgtaaatagcttcccacttctggacccatctgatgcaccttttccctcactcgattccccgggaaaagcaatccgaggaccacagcagcccatttggaagccctttcctaatcaagacagtgactcggtggtactaagtggcacagactcagaactgcatatacctcgagtatgtgaattctgtcaagcagttttcccaccatccattacatccaggggggatttccttcggcatcttaattcacacttcaatggagagacttaagacacatttgaaaacagacatatcaagttctatgtgatgattttgggtttttaatactataaatacttgattgtaaactaaattcaagatcatttataggaaaatctagtttcacagctatttgaatttttttctggatttactatataactcttattttttaaaagatcattctgttctttcaaggagaaataagcctaaaagaagaaaaacaaaaaaaattctgtataaaactgtaatcctttgtattcatgtttacagtgctattactataattcaaaattatgtatgtgacttagagttatataatcataatttatgtttatttcaaatatctaagtttattgcttggatttctagtgagagctgttgaatttggtgatgtcaaatgtttctagggtttttttagtttgtttttattgaaaaatttaattatttatgctataggtgatattctctttgaataaacctataatagaaaatagcagacaacataaacatctttgtaaatatcaaacctaatacatttcttgtccagtgataaaacaactggtagaattatttaaacactttagatttttaaataatatacatggctttaatttttactgtgtgtatagctacatgatgaaattaattaaata

SEQ ID NO: 34 - DNA, 2328 bp, Homo sapiens
  misc_feature: Incyte ID No: 1453334CB1
gaccgcagccccggagcccgggccagggtccacctgtccccgcagcgccggctcgcgccctcctgccgcagccaccgagccgccgtctagcgccccgacctcgccaccatgagagccctgctggcgcgcctgcttctctgcgtcctggtcgtgagcgactccaaaggcagcaatgaacttcatcaagttccatcgaactgtgactgtctaaatggaggaacatgtgtgtccaacaagtacttctccaacattcactggtgcaactgcccaaagaaattcggagggcagcactgtgaaatagataagtcaaaaacctgctatgaggggaatggtcacttttaccgaggaaaggccagcactgacaccatgggccggccctgcctgccctggaactctgccactgtccttcagcaaacgtaccatgcccacagatctgatgctcttcagctgggcatggggaaacataattactgcaggaacccagacaaccggaggcgaccctggtgctatgtgcaggtgggcctaaagccgcttgtccaagagtgcatggtgcatgactgcgcagatggaaaaaagccctcctctcctccagaagaattaaaatttcagtgtggccaaaagactctgaggccccgctttaagattattgggggagaattcaccaccatcgagaaccagccctggtttgcggccatctacaggaggcaccgggggggctctgtcacctacgtgtgtggaggcagcctcatcagcccttgctgggtgatcagcgccacacactgcttcattgattacccaaagaaggaggactacatcgtctacctgggtcgctcaaggcttaactccaacacgcaaggggagatgaagtttgaggtggaaaacctcatcctacacaaggactacagcgctgacacgcttgctcaccacaatgacattgccttgctgaagatccgttccaaggagggcaggtgtgcgcagccatcccggactatacagaccatctgcctgccctcgatgtataacgatccccagtttggcacaagctgtgagatcactggctttggaaaagagaattctaccgactatctctatccggagcagctgaaaatgactgttgtgaagctgatttcccaccgggagtgtcagcagccccactactacggctctgaagtcaccaccaaaatgctgtgtgctgctgacccacagtggaaaacagattcctgccagggagactcagggggacccctcgtctgttccctccaaggccgcatgactttgactggaattgtgagctggggccgtggatgtgccctgaaggacaagccaggcgtctacacgagagtctcacacttcttaccctggatccgcagtcacaccaaggaagagaatggcctggccctctgagggtccccagggaggaaacgggcaccacccgctttcttgctggttgtcatttttgcagtagagtcatctccatcagctgtaagaagagactgggaagataggctctgcacagatggatttgcctgtgccacccaccagggcgaacgacaatagctttaccctcaggcataggcctgggtgctggctgcccagacccctctggccaggatggaggggtggtcctgactcaacatgttactgaccagcaacttgtctttttctggactgaagcctgcaggagttaaaaagggcagggcatctcctgtgcatgggtgaagggagagccagctcccccgacggtgggcatttgtgaggcccatggttgagaaatgaataatttcccaattaggaagtgtaacagctgaggtctcttgagggagcttagccaatgtgggagcagcggtttggggagcagagacactaacgacttcagggcagggctctgatattccatgaatgtatcaggaaatatatatgtgtgtgtatgtttgcacacttgtgtgtgggctgtgagtgtaagtgtgagtaagagctggtgtctgattgttaagtctaaatatttccttaaactgtgtggactgtgatgccacacagagtggtctttctggagaggttataggtcactcctggggcctcttgggtcccccacgtgacagtgcctgggaatgtattattctgcagcatgacctgtgaccagcactgtctcagtttcactttcacatagatgtccctttcttggccagttatcccttccttttagcctagttcatccaatcctcactgggtggggtgaggaccactccttacactgaatatttatatttcactatttttatttatatttttgtaattttaaataaaagtgatcaataaaatgtgattttt

SEQ ID NO: 35 - DNA, 1530 bp, Homo sapiens
  misc_feature: Incyte ID No: 779175CB1
ctctccggcccccaccgcggatcatgtaccaggattatcccgggaactttgacacctcgtcccggggcagcagcggctctcctgcgcacgccgagtcctactccagcggcggcggcggccagcagaaattccgggtagatatgcctggctcaggcagtgcattcatccccaccatcaacgccatcacgaccagccaggacctgcagtggatggtgcagcccacagtgatcacctccatgtccaacccataccctcgctcgcacccctacagccccctgccgggcctggcctctgtccctggacacatggccctcccaagacctggcgtgatcaagaccattggcaccaccgtgggccgcaggaggagagatgagcagctgtctcctgaagaggaggagaagcgtcgcatccggcgggagaggaacaagctggctgcagccaagtgccggaaccgacgccgggagctgacagagaagctgcaggcggagacagaggagctggaggaggagaagtcaggcctgcagaaggagattgctgagctgcagaaggagaaggagaagctggagttcatgttggtggctcacggcccagtgtgcaagattagccccgaggagcgccgatcgcccccagcccctgggctgcagcccatgcgcagtgggggtggctcggtgggcgctgtagtggtgaaacaggagcccctggaagaggacagcccctcgtcctcgtcggcggggctggacaaggcccagcgctctgtcatcaagcccatcagcattgctgggggcttctacggtgaggagcccctgcacacccccatcgtggtgacctccacacctgctgtcactccgggcacctcgaacctcgtcttcacctatcctagcgtcctggagcaggagtcacccgcatctccctccgaatcctgctccaaggctcaccgcagaagcagtagcagcggggaccaatcatcagactccttgaactcccccactctgctggctctgtaacccagtgcacctccctccccagctccggagggggtcctcctcgctcctccttcccagggaccagcaccttcaagcgctccagggccgtgagggcaagagggggacctgccaccagggagcttcctggctctgggggacccaggtgggacttagcagtgagtattggaagacttgggttgatctcttagaagccatgggacctcctccctcattcatcttgcaagcaaatcccatttcttgaaaagccttggagaactcggtttggtagacttggacatctctctggcttctgaagagcctgaagctggcctggaccattcctgtccctttgttaccatactgtctctggagtgatggtgtccttccctgccccaccacgcatgctcagtgccttttggtttcaccttccctcgacttgacccttccctcccccagcgtcagtttcactccctcttggtttttatcaaatttgccatgacatttcatctgggtggtctgaatattaaagctcttcatttctggaaaa

SEQ ID NO: 36 - DNA, 1112 bp, Homo sapiens
  misc_feature: Incyte ID No: 246574.3
cgggccgcaggcacctcctcgccagctcttcctctcctctcacagccgccagacccgcctgctgagccccatggcccgcgctgctctctccgccgcccccagcaatccccggctcctgcgagtggcgctgctgctcctgctcctggtagccgctggccggcgcgcagcaggagcgtccgtggccactgaactgcgctgccagtgcttgcagaccctgcagggaattcaccccaagaacatccaaagtgtgaacgtgaagtcccccggaccccactgcgcccaaaccgaagtcatagccacactcaagaatgggcggaaagcttgcctcaatcctgcatcccccatagttaagaaaatcatcgaaaagatgctgaacagtgacaaatccaactgaccagaagggaggaggaagctcactggtggctgttcctgaaggaggccctgcccttataggaacagaagaggaaagagagacacagctgcagaggccacctggattgtgcctaatgtgtttgagcatcgcttaggagaagtcttctatttactttatttattcattagttttgaagattctatgttaatattttaggtgtaaaataattaagggtatgattaactctacctgcacactgtcctattatattcattctttttgaaatgtcaaccccaagttagttcaatctggattcatatttaatttgaaggtagaatgttttcaaatgttctccagtcattatgttaatatttctgaggagcctgcaacatgccagccactgtgatagaggctggcggatccaagcaaatggccaatgagatcattgtgaaggcaggggaatgtatgtgcacatctgttttgtaactgtttagatgaatgtcagttgttatttattgaaatgatttcacagtgtgtggtcaacatttctcatgttgaaactttaagaactaaaatgttctaaatatcccttggacattttatgtctttcttgtaaggcatactgccttgtttaatggtagttttacagtgtttctggcttagaacaaaggggcttaattattgatgttttcatagagaatataaaaataaagcacttatagaaaaaaaaaaaaaaagg

SEQ ID NO: 37 - DNA, 2698 bp, Homo sapiens
  misc_feature: Incyte ID No: 227742.4
ggagacgccgccggccgccgctggcgcatggcggggagctgtggcgcggggccttccaggagtctgagctatgagtggcccctgtggagagaagcctgtcctggaagccagccccaccatgagtctgtgggaatttgaggacagccacagccgtcagggcaccccaaggccgggtcaagagctggccgctgaggaggcctcggccctggaactgcagatgaaggtggacttcttccggaagctgggctattcatccacggagatccacagcgtcctgcagaagctgggcgtccaggcagacaccaacacggtgctgggtgagctggtgaaacacgggacagccaccgagcgggagcgccagacctcaccggacccctgccctcagctccctctagtcccgcggggtggtggcacccctaaggctcccaacctggagcctccactcccagaagaggaaaaggagggcagcgacctgagaccagtggtcatcgatgggagcaacgtggccatgagccatgggaacaaggaggtcttctcctgccggggcatcctgctggcagtgaactggtttctggagcggggccacacagacatcacagtgtttgtgccatcctggaggaaggagcagcctcggcccgacgtgcccatcacagaccagcacatcctgcgggaactggagaagaagaagatcctggtgttcacaccatcacgacgcgtgggtggcaagcgggtggtgtgctatgacgacagattcattgtgaagctggcctacgagtctgacgggatcgtggtttccaacgacacataccgtgacctccaaggcgagcggcaggagtggaagcgcttcatcgaggagcggctgctcatgtactccttcgtcaatgacaagtttatgccccctgatgacccactgggccggcacgggcccagcctggacaacttcctgcgtaagaagccactcactttggagcacaggaagcagccgtgtccctatggaaggaaatgcacctatgggatcaagtgccgattcttccacccagagcggccaagctgcccccagcgctctgtggcagatgagctccgtgccaatgctctcctctcaccccccagagccccaagcaaggacaaaaatggccggcggccttcaccttcatcccagtccagctctctgctaacagagagtgagcagtgcagcctggatgggaagaagctgggggcccaggcatccccagggtcccgccaagagggtctaacacagacctatgccccatcaggcaggagcctcgcacctagcgggggcagtggcagcagctttgggcccacagactggctcccacagacgctggactcactcccgtacgtctcccaggattgcctggactcgggcattggctccctggagagccagatgtcggaactttggggggttcgaggaggaggccctggtgagccgggcccaccccgagccccttacacgggctacagtccctatggatctgagctcccagccaccgcagccttctctgcctttggccgggccatgggtgctggccacttcagtgtccctgccgactacccacccgcgccccctgcctttccacctcgagagtactggtctgaaccatacccactgcccccacccacatcagtccttcaggagcccccagtgcagagcccaggggctggcaggagcccgtggggcagggcaggcagcctggccaaggagcaggccagcgtgtatactaagctgtgtggtgtgtttcccccgcacctggtggaggctgtgatggggcgcttcccacagctcctggacccccagcagctggctgccgagatcctctcctacaagtcccagcaccccagtgagtaagctgcctgtggctggcaaggggcagcacccccagcctccaagggccgtcaggctgggctttgggccattgagcagcccattcccagccctgaggcccaccccagaggctggacagagggaggattcaagtcgggaaggaaacccacaaaccaaagatactgtaggattggttctggcccatgcagcacctctagctgtctgcctcagtgggtcagaagcgatcaccctgttgatacacattgtatctctgtagtttaaggagacgctgccggtaacggcgtcggtccgtggctgaggcccaaaccgtcttttctctcagagggtggggagggaggtgggggcagcagaggcctgggctgggtgccctgtgcacgccaccccacttccgccctacccctgggacgttggccttggctggctagttgggcaccgtgtgcctgccctccaagggcctcctctacgccaatgaggcctcatctgtgctctcgctgggcacgtggcttcatgtcagtaagcaagatgcttcttaataacccaccttctgccccactctattccttatcctgctgcccctgtaggggtcaagggccctccgtctacaccctcttcttctcctccatcctttattcagagtcatctcgcccttccccatgggtgggggaacctgtgtttgtttgtgtgcacatgtaaattttaaatattttaagcagaaagtccttacctcctgtaacacatcaataaagtacatcattgtgaaaaaaaatctatgtcgggtgcggagaaagaggtaatgaaatggcaggaattcgatatcagcttatcataccg

SEQ ID NO: 38 - DNA, 1942 bp, Homo sapiens
  misc_feature: Incyte ID No: 337792.2
ggggggacaaaagcgtggtctctggcgcggggatctcagagtttcccgggcactcaccgtgtgtagttggcatctccgcgcgtccggacacccgatcccagcatccctgcctgcaggactgttcgtgttcagctcgcgtcctgcagctgtccgaggtgctccagttggaggctgaggttcccgggctctgtagctgagtgggcggcggcaccggcggagatgcctgggaagaaggcgcgcaagaacgctcaaccgagccccgcgcgggctccagcagagctggaagtcgagtgtgctactcaactcaggagatttggagacaaactgaacttccggcagaaacttctgaatctgatatccaaactcttctgctcaggaacctgactgcatcaaaaacttgcatgaggggactccttcaaaagagttttctcaggaggtgcacgtttcatcaatttgaagaaagactgcattgtaattgagaggaatgtgaaggtgcattcatgggtgcccttggaaacggaagatggaatacatcaaagtgaatttctgttcaagttttcccagattatcattctttgggatgagagaacattataaaaccactttgtttattttaaagcaagaatggaagacccttgaaaataaagaagtaattattgacacatttcttttttacttagagaatcgttctagtgtttttgccgaagattaccgctggcctactgtgaagggagatgacctgtgattagactgggcggctggggagaaacagttcagtgcattgttgttgttgctgtttttggtgttttgcttttcagtgccaactcagcacattgtatatgattcggtttatacatattaccttgttataatgaaaaaactcattctgagaacactgaaatgttatactcagtgttgatttcttcggtcactacacaacgtaaaatcatttgtttcttttgactcaaattgtattgcttctgttcagatgatctttcattcaatgtgttcctgttgggcgttactagaaactatggaaaactggaaaataactttgaaaaaattggataaagtataggagggttacttggggccagtaaatcagtagactgaacattcaatataataaaagaacatggggattttgtataaccagggataataaaaagaaaaaagaagttaatttttaattgatgtttttgaaacttagtagaacaaatattcagaagtaacttgataagatatgaatgtttctaaagaagtttctaaaggttcggaaaatgctccttgtcacattagtgtgcatcctacaaaaagtgatctcttaatgtaaattaagaatattttcataattggaatatacttttcttaaaaaaaaggaacagttagttctcatctagaatgaaagttccatatatgcattggtgaatatatatgtatacacatacttacatacttatatgggtatctgtatagataatttgtattagagtattatatagcttcttagtagggtctcaagtaagtttcattttttttatctgggctatatacagtcctcaaataaataatgtcttgattttatttcagcaggaataattttatttattttgcctatttataattaaagtatttttctttagtttgaaaatgtgtattaaagttacatttttgagttacaagagtcttataactacttgaatttttagttaaaatgtcttaatgtaggttgtagtcactttagatggaaaattacctcacatctgttttcttcagtattacttaagattgtttatttagtggtagagagttttttttttcagcctagaggcagctattttaccatctggtatttatggtctaatttgtatttaaacatatgcacacatataaaagttgatactgtggcagtaaactattaaaagttttcactgttaaaaaa

SEQ ID NO: 39 - DNA, 2477 bp, Homo sapiens
  misc_feature: Incyte ID No: 057385.565
  unsure 2161: a, t, c, g, or other
tactccatgcatgtaatccttgcagcctcctgctttgacatagggttgatgaggagtgggagtgtctgagcaaatactagaatccagacaaatatgcacacgccttttgcatgttcaatcctttttatcttgttgtagcgtagagggtgcaccacagcaatgaagcggtgaatactcaggcaggtcataaagttcacacctgcatatgtgttgatgtaaaacactagcgcagttatcctacacaaggcatctccgattctccagtcaaagcccattgcatagtaggctattcgtgtaggcaaagcggtggtaaaaagtatatcagaaataaccaaatttgttgaatagagggtggtagagttgattacttcagtttggacaactactcacagctactacacagagacccgaacgagtcactgatatacacctggaccaccaccaatggatatacaaatggcaaacaattttactccgccctctgcaactcctcagggaaatgactgtgacctctatgcacatcacagcacggccaggatagtaatgcctctgcattacagcctcgtcttcatcattgggctcgtgggaaacttactagccttggtcgtcattgttcaaaacaggaaaaaaatcaactctaccaccctctattcaacaaatttggttatttctgatatactttttaccaccgctttgcctacacgaatagcctactatgcaatgggctttgactggagaatcggagatgccttgtgtaggataactgcgctagtgttttacatcaacacatatgcaggtgtgaactttatgacctgcctgagtattgaccgcttcattgctgtggtgcaccctctacgctacaacaagataaaaaggattgaacatgcaaaaggcgtgtgcatatttgtctggattctagtatttgctcagacactcccactcctcatcaaccctatgtcaaagcaggaggctgaaaggattacatgcatggagtatccaaactttgaagaaactaaatctcttccctggattctgcttggggcatgtttcataggatatgtacttccacttataatcattctcatctgctattctcagatctgctgcaaactcttcagaactgccaaacaaaacccactcactgagaaatctggtgtaaacaaaaaggctctcaacacaattattcttattattgttgtgtttgttctctgtttcacaccttaccatgttgcaattattcaacatatgattaagaagcttcgtttctctaatttcctggaatgtagccaaagacattcgttccagatttctctgcactttacagtatgcctgatgaacttcaattgctgcatggacccttttatctacttctttgcatgtaaagggtataagagaaaggttatgaggatgctgaaacggcaagtcagtgtatcgatttctagtgctgtgaagtcagcccctgaagaaaattcacgtgaaatgacagaaacgcagatgatgatacattccaagtcttcaaatggaaagtgaaatggattgtattttggtttatagtgacgtaaactgtatgacaaactttgcaggacttcccttataaagcaaaataattgttcagcttccaattagtattcttttatatttctttcattgggcactttcccatctccaactcggaagtaagcccaagagaacaacataaagcaaacaacataaagcacaataaaaatgcaaataaatatttcatttttatttgtaaacgaatacaccaaaaggaggcgctcttaataactcccaatgtaaaaagttttgttttaataaaaaatttaattattatttcttgccaacaaatggctagaaaggactgaatagattatatattgccagatgttaatactgtaacatactttttaaataacatatttcttaaatccaaatttctctcaatgttagatttaattccctcaataacaccaatgttttgttttgtttcgttctgggtcataaaactttgttaaggaactcttttggaataaagagcaggatgctgcaaagttatgagtctgtccctcaatgctccctgtcaactatcagtgggagtgtcagggaaaagataattggcaatagactttgaactgcaacattataaatgatgatgatgatnactgaggcaatgaaagcactgagcttttcctggagctgccagcacagtcttttagggcctctgcttagcaatatgaaaaagactttatatggaggtgcccattgggaggagggtctgcttgctaaattcatcttgagaataaaagacatgcctatatgattggttttcttgggatcactaggggatcatttctcttttcttcccccaagctgttagtactctacatctgtatttcaatggtttgagttatcaagtaggagaagggtggtgcatgatgagcagtgaaaaatatagctgctgcttgctaaatacgatc

SEQ ID NO: 40 - DNA, 3907 bp, Homo sapiens
  misc_feature: Incyte ID No: 331150.1
gctggaggcgcgcaggccggctccgctccggccccggacgatgcggcgcgcccaggatgctgccgtgcctcgtagtgctgctggcggcgctcctcagcctccgtcttggctcagacgctcatggtaaggctccgggacgcggcccttccctgccctgccctctccgcgcccgctccattaaagttctccatccagtggagagccctggctggctggccctctggcagagcggtgcccgggtgctcccttactctggcaaacctggatctcaggctcacctgttgtggaagtggaagaggctgaaattgacaggaactgacggattgggaaggatagagaagtatgcgcaaggccaaacccccaacccgcaaacctcatcatccacccacttctagatgagccggacagagctgcccagccctccgtctgtgtggtttgaagcagaatttttccaccacatcctccactggacacccatcccaaatcagtctgaaagtacctgctatgaagtggcgctcctgaggtatggaatagagtcctggaactccatctccaactgtagccagaccctgtcctatgaccttaccgcagtgaccttggacctgtaccacagcaatggctaccgggccagagtgcgggctgtggacggcagccggcactccaactggaccgtcaccaacacccgcttctctgtggatgaagtgactctgacagttggcagtgtgaacctagagatccacaatggcttcatcctcgggaagattcagctacccaggcccaagatggcccccgcaaatgacacatatgaaagcatcttcagtcacttccgagagtatgagattgccattcgcaaggtgccgggaaacttcacgttcacacacaagaaagtaaaacatgaaaacttcagcctcctaacctctggagaagtgggagagttctgtgtccaggtgaaaccatctgtcgcttcccgaagtaacaaggggatgtggtctaaagaggagtgcatctccctcaccaggcagtatttcaccgtgaccaacgtcatcatcttctttgcctttgtcctgctgctctccggagccctcgcctactgcctggccctccagctgtatgtgcggcgccgaaagaagctacccagtgtcctgctcttcaagaagcccagccccttcatcttcatcagccagcgtccctccccagagacccaagacaccatccacccgcttgatgaggaggcctttttgaaggtgtccccagagctgaagaacttggacctgcacggcagcacagacagtggctttggcagcaccaagccatccctgcagactgaagagccccagttcctcctccctgaccctcacccccaggctgacagaacgctgggaaacggggagccccctgtgctgggggacagctgcagtagtggcagcagcaatagcacagacagcgggatctgcctgcaggagcccagcctgagccccagcacagggcccacctgggagcaacaggtggggagcaacagcaggggccaggatgacagtggcattgacttagttcaaaactctgagggccgggctggggacacacagggtggctcggccttgggccaccacagtcccccggagcctgaggtgcctggggaagaagacccagctgctgtggcattccagggttacctgaggcagaccagatgtgctgaagagaaggcaaccaagacaggctgcctggaggaagaatcgcccttgacagatggccttggccccaaattcgggagatgcctggttgatgaggcaggcttgcatccaccagccctggccaagggctatttgaaacaggatcctctagaaatgactctggcttcctcaggggccccaacgggacagtggaaccagcccactgaggaatggtcactcctggccttgagcagctgcagtgacctgggaatatctgactggagctttgcccatgaccttgcccctctaggctgtgtggcagccccaggtggtctcctgggcagctttaactcagacctggtcaccctgcccctcatctctagcctgcagtcaagtgagtgactcgggctgagaggctgcttttgattttagccatgcctgctcctctgcctggaccaggaggagggcccctggggcagaagttaggcacgaggcagtctgggcacttttctgcaagtccactggggctggccccagccaggccctgcagggctggtcagggtgtctggggcaggaggaggccaactcactgaactagtgcagggtatgtgggtggcactgacctgttctgttgactggggccctgcagactctggcagagctgagaagggcagggaccttctccctcctaggaactctttcctgtatcataaaggattatttgctcaggggaaccatggggctttctggagttgtggtgaggccaccaggctgaagtcagctcagacccagacctccctgcttaggccactcgagcatcagagcttccagcaggaggaagggctgtaggaatggaagcttcagggccttgctgctggggtcatttttaggggaaaaaggaggatatgatggtcacatggggaacctcccctcatcgggcctctggggcaggaagcttgtcactggaagatcttaaggtatatattttctggacactcaaacacatcataatggattcactgaggggagacaaagggagccgagaccctggatggggcttccagctcagaacccatccctctggtgggtacctctggcacccatctgcaaatatctccctctctccaacaaatggagtagcatccccctggggcacttgctgaggccaagccactcacatcctcactttgctgccccaccatcttgctgacaacttccagagaagccatggttttttgtattggtcataactcagccctttgggcggcctctgggcttgggcaccagctcatgccagccccagagggtcagggttggaggcctgtgcttgtgtttgctgctaatgtccagctacagacccagaggataagccactgggcactgggctggggtccctgccttgttggtgttcagctgtgtgattttggactagccacttgtcagagggcctcaatctcccatctgtgaaataaggactccacctttaggggaccctccatgtttgctgggtattagccaagctggtcctgggagaatgcagatactgtccgtggactaccaagctggcttgtttcttatgccagaggctaacagatccaatgggagtccatggtgtcatgccaagacagtatcagacacagccccagaagggggcattatgggccctgcctccccataggccatttggactctgccttcaaacaaaggcagttcagtccacaggcatggaagctgtgaggggacaggcctgtgcgtgccatccagagtcatctcagccctgcctttctctggagcattctgaaaacagatattctggcccagggaatccagccatgacccccacccctctgccaaagtactcttaggtgccagtctggtaactgaactccctctggaggcaggcttgagggaggattcctcagggttcccttgaaagctttatttatttattttgttcatttatttattggagaggcagcattgcacagtgaaagaattctggatatctcaggagccccgaaattctagctctgactttgctgtttccagtggtatgaccttggagaagtcacttatcctttgagcctcagtttcctcatctgcagaataatgactgacttgtctaattcgtagggatgtgaggttctgctgaggaaatgggtatgaatgtgccttgaacacaaagctctgtcaataagtgatacatgttttttattccaataaattgtcaagaccac

SEQ ID NO: 41 - DNA, 1472 bp, Homo sapiens
  misc_feature: Incyte ID No: 989010.6
gtacaaaaatatatttatttggtgtaatagttacaaaatattcatttccacaataatattttagcaatgcattggaatgttaaaaaaaattctttgtattaatgattcttgcaaagaccctcaaaacatcccaggggtagaactgtggttcaagaggaaaagcaatttccccaagtctctgtatctaaaaaacactagtaccatgaaagataaacttaaaacatcaataacttaaataagaattaacattacttaaggcataatgtttcacatcaacaaacaaaattcattataataaaataaaacaaggtgtctggggaaagctaggggaaaataagttagctgcagattcttgggttgtggagtgagtgttcaagtcttcggagtttgggtttgcttgtccaggtggtccatggaatcctgaacccacttctgcttggggtcagcacagatctcagtgcagaggctcgcgagctatagaagaatcaccagcagcaagtgtcccaaagaagctgtgatgtgagttcagcacaccaaccttccctggcctgaagttcttccttgtggagcaagggacaagcctcataaacctagagtcagagagtgcactatttaacttaatgtacaaaggttcccaatgggaaaactgaggcaccaagggaaaaagtgaaccccaacatcactctccacctgggtgcctattcagaacaccccaatttttttagcttgaagtcaggatggctccacctggacacctataggagcagtttgccctgggttccctccttccacctgcgttcctcctctagctcccatggcagccctttggtgcagaatgggctgcacttctagaccaaaactgcaaaggaacttcatctaactctgtcctccctccccacagcttcaagaccattgtggccaaggagatctgtgctgaccccaagcagaagtgggttcaggattccatggaccacctggacaagcaaacccaaactccgaagacttgaacactcactccacaacccaagaatctgcagctaacttattttcccctagctttccccagacaccctgttttattttattataatgaattttgtttgttgatgtgaaacattatgccttaagtaatgttaattcttatttaagttattgatgttttaagtttatctttcatggtactagtgttttttagatacagagacttggggaaattgcttttcctcttgaaccacagttctacccctgggatgttttgagggtctttgcaagaatcattaatacaaagaattttttttaacattccaatgcattgctaaaatattattgtggaaatgaatattttgtaactattacaccaaataaatatatttttgtacaaaatattcatttccacaataatattttagcaatgcattggaatgttaaaatattattgtggaaatgaatattttgtaactattacaccaaat

SEQ ID NO: 42 - DNA, 2472 bp, Homo sapiens
  misc_feature: Incyte ID No: 3072333CB1
gcgctgaggatcagccgcttcctgcctggattccacagcttcgcgccgtgtactgtcgccccatccctgcgcgcccagcctgccaagcagcgtgccccggttgcaggcgtcatgcagcgggcgcgacccacgctctgggccgctgcgctgactctgctggtgctgctccgcgggccgccggtggcgcgggctggcgcgagctcggggggcttgggtcccgtggtgcgctgcgagccgtgcgacgcgcgtgcactggcccagtgcgcgcctccgcccgccgtgtgcgcggagctggtgcgcgagccgggctgcggctgctgcctgacgtgcgcactgagcgagggccagccgtgcggcatctacaccgagcgctgtggctccggccttcgctgccagccgtcgcccgacgaggcgcgaccgctgcaggcgctgctggacggccgcgggctctgcgtcaacgctagtgccgtcagccgcctgcgcgcctacctgctgccagcgccgccagctccaggaaatgctagtgagtcggaggaagaccgcagcgccggcagtgtggagagcccgtccgtctccagcacgcaccgggtgtctgatcccaagttccaccccctccattcaaagataatcatcatcaagaaagggcatgctaaagacagccagcgctacaaagttgactacgagtctcagagcacagatacccagaacttctcctccgagtccaagcgggagacagaatatggtccctgccgtagagaaatggaagacacactgaatcacctgaagttcctcaatgtgctgagtcccaggggtgtacacattcccaactgtgacaagaagggattttataagaaaaagcagtgtcgcccttccaaaggcaggaagcggggcttctgctggtgtgtggataagtatgggcagcctctcccaggctacaccaccaaggggaaggaggacgtgcactgctacagcatgcagagcaagtagacgcctgccgcaaggttaatgtggagctcaaatatgccttattttgcacaaaagactgccaaggacatgaccagcagctggctacagcctcgatttatatttctgtttgtggtgaactgatttttttttaaaccaaagtttagaaagaggtttttgaaatgcctatggtttctttgaatggtaaacttgagcatcttttcactttccagtagtcagcaaagagcagtttgaattttcttgtcgcttcctatcaaaatattcagagactcgagcacagcacccagacttcatgcgcccgtggaatgctcaccacatgttggtcgaagcggccgaccactgactttgtgacttaggcggctgtgttgcctatgtagagaacacgcttcacccccactccccgtacagtgcgcacaggctttatcgagaataggaaaacctttaaaccccggtcatccggacatcccaacgcatgctcctggagctcacagccttctgtggtgtcatttctgaaacaagggcgtggatccctcaaccaagaagaatgtttatgtcttcaagtgacctgtactgcttggggactattggagaaaataaggtggagtcctacttgtttaaaaaatatgtatctaagaatgttctagggcactctgggaacctataaaggcaggtatttcgggccctcctcttcaggaatcttcctgaagacatggcccagtcgaaggcccaggatggcttttgctgcggccccgtggggtaggagggacagagagacagggagagtcagcctccacattcagaggcatcacaagtaatggcacaattcttcggatgactgcagaaaatagtgttttgtagttcaacaactcaagacgaagcttatttctgaggataagctctttaaaggcaaagctttattttcatctctcatcttttgtcctccttagcacaatgtaaaaaagaatagtaatatcagaacaggaaggaggaatggcttgctggggagcccatccaggacactgggagcacatagagattcacccatgtttgttgaacttagagtcattctcatgcttttctttataattcacacatatatgcagagaagatatgttcttgttaacattgtatacaacatagccccaaatatagtaagatctatactagataatcctagatgaaatgttagagatgctatttgatacaactgtggccatgactgaggaaaggagctcacgcccagagactgggctgctctcccggaggccaaacccaagaaggtctggcaaagtcaggctcagggagactctgccctgctgcagacctcggtgtggacacacgctgcatagagctctccttgaaaacagaggggtctcaagacattctgcctacctattagcttttctttatttttttaactttttggggggaaaagtatttttgagaagtttgtcttgcaatgtatttataaatagtaaataaagtttt

SEQ ID NO: 43 - DNA, 2172 bp, Homo sapiens
  misc_feature: Incyte ID No: 247025.3
gggagacagggtagtgcgaggccgggcacagccttcctgtgtggttttaccgcccagagagcgtcatggacctggggaaaccaatgaaaagcgtgctggtggtggctctccttgtcattttccaggtatgcctgtgtcaagatgaggtcacggacgattacatcggagacaacaccacagtggactacactttgttcgagtctttgtgctccaagaaggacgtgcggaactttaaagcctggttcctccctatcatgtactccatcatttgtttcgtgggcctactgggcaatgggctggtcgtgttgacctatatctatttcaagaggctcaagaccatgaccgatacctacctgctcaacctggcggtggcagacatcctcttcctcctgacccttcccttctgggcctacagcgcggccaagtcctgggtcttcggtgtccacttttgcaagctcatctttgccatctacaagatgagcttcttcagtggcatgctcctacttctttgcatcagcattgaccgctacgtggccatcgtccaggctgtctcagctcaccgccaccgtgcccgcgtccttctcatcagcaagctgtcctgtgtgggcatctggatactagccacagtgctctccatcccagagctcctgtacagtgacctccagaggagcagcagtgagcaagcgatgcgatgctctctcatcacagagcatgtggaggcctttatcaccatccaggtggcccagatggtgatcggctttctggtccccctgctggccatgagcttctgttaccttgtcatcatccgcaccctgctccaggcacgcaactttgagcgcaacaaggccatcaaggtgatcatcgctgtggtcgtggtcttcatagtcttccagctgccctacaatggggtggtcctggcccagacggtggccaacttcaacatcaccagtagcacctgtgagctcagtaagcaactcaacatcgcctacgacgtcacctacagcctggcctgcgtccgctgctgcgtcaaccctttcttgtacgccttcatcggcgtcaagttccgcaacgatctcttcaagctcttcaaggacctgggctgcctcagccaggagcagctccggcagtggtcttcctgtcggcacatccggcgctcctccatgagtgtggaggccgagaccaccaccaccttctccccataggcgactcttctgcctggactagagggacctctcccagggtccctggggtggggatagggagcagatgcaatgactcaggacatccccccgccaaaagctgctcagggaaaagcagctctcccctcagagtgcaagcccctgctccagaagatagcttcaccccaatcccagctacctcaaccaatgccaaaaaaagacagggctgataagctaacaccagacagacaacactgggaaacagaggctattgtcccctaaaccaaaaactgaaagtgaaagtccagaaactgttcccacctgctggagtgaaggggccaaggagggtgagtgcaaggggcgtgggagtggcctgaagagtcctctgaatgaaccttctggcctcccacagactcaaatgctcagaccagctcttccgaaaaccaggccttatctccaagaccagagatagtggggagacttcttggcttggtgaggaaaagcggacatcagctggtcaaacaaactctctgaacccctccctccatcgttttcttcactgtcctccaagccagcgggaatggcagctgccacgccgccctaaaagcacactcatcccctcacttgccgcgtcgccctcccaggctctcaacaggggagagtgtggtgtttcctgcaggccaggccagctgcctccgcgtgatcaaagccacactctgggctccagagtggggatgacatgcactcagctcttggctccactgggatgggaggagaggacaagggaaatgtcaggggcggggagggtgacagtggccgcccaaggcccacgagcttgttctttgttctttgtcacagggactgaaaacctctcctcatgttctgctttcgattcgttaagagagcaacattttacccacacacagataaagttttcccttgaggaaacaacagctttaaaagaaaaagaaaaaaaaagtctttggtaaatggc

SEQ ID NO: 44 - DNA, 1481 bp, Homo sapiens
  misc_feature: Incyte ID No: 229299.3
attatcaatttcctttcatgttcagcatttctactccttccaagaagagcagcaaagctgaagtagcagcaacagcaccagcagcaacagcaaaaaacaaacatgagtgtgaagggcatggctatagccttggctgtgatattgtgtgctacagttgttcaaggcttccccatgttcaaaagaggacgctgtctttgcataggccctggggtaaaagcagtgaaagtggcagatattgagaaagcctccataatgtacccaagtaacaactgtgacaaaatagaagtgattattaccctgaaagaaaataaaggacaacgatgcctaaatcccaaatcgaagcaagcaaggcttataatcaaaaaagttgaaagaaagaatttttaaaaatatcaaaacatatgaagtcctggaaaagggcatctgaaaaacctagaacaagtttaactgtgactactgaaatgacaagaattctacagtaggaaactgagacttttctatggttttgtgactttcaacttttgtacagttatgtgaaggatgaaaggtgggtgaaaggaccaaaaacagaaatacagtcttcctgaatgaatgacaatcagaattccactgcccaaaggagtccaacaattaaatggatttctaggaaaagctaccttaagaaaggctggttaccatcggagtttacaaagtgctttcacgttcttacttgttgtattatacattcatgcatttctaggctagagaaccttctagatttgatgcttacaactattctgttgtgactatgagaacatttctgtctctagaagttatctgtctgtattgatctttatgctatattactatctgtggttacagtggagacattgacattattactggagtcaagcccttataagtcaaaagcatctatgtgtcgtaaagcattcctcaaacattttttcatgcaaatacacacttctttccccaaatatcatgtagcacatcaatatgtagggaaacattcttatgcatcatttggtttgttttataaccaattcattaaatgtaattcataaaatgtactatgaaaaaaattatacgctatgggatactggcaacagtgcacatatttcataaccaaattagcagcaccggtcttaatttgatgtttttcaacttttattcattgagatgttttgaagcaattaggatatgtgtgtttactgtactttttgttttgatccgtttgtataaatgatagcaatatcttggacacatttgaaatacaaaatgtttttgtctaccaaagaaaaatgttgaaaaataagcaaatgtatacctagcaatcacttttactttttgtaattctgtctcttagaaaaatacataatctaatcaatttctttgttcatgcctatatactgtaaaatttaggtatactcaagactagtttaaagaatcaaagtcatttttttctctaataaactaccacaacc

SEQ ID NO: 45 - DNA, 1620 bp, Homo sapiens
  misc_feature: Incyte ID No: 1452055CB1
gccaaggctggggcaggggagtcagcagaggcctcgctcgggcgcccagtggtcctgccgcctggtctcacctcgccatggttcgtctgcctctgcagtgcgtcctctggggctgcttgctgaccgctgtccatccagaaccacccactgcatgcagagaaaaacagtacctaataaacagtcagtgctgttctttgtgccagccaggacagaaactggtgagtgactgcacagagttcactgaaacggaatgccttccttgcggtgaaagcgaattcctagacacctggaacagagagacacactgccaccagcacaaatactgcgaccccaacctagggcttcgggtccagcagaagggcacctcagaaacagacaccatctgcacctgtgaagaaggctggcactgtacgagtgaggcctgtgagagctgtgtcctgcacggctcatgctcgcccggctttggggtcaagcagattgctacaggggtttctgataccatctgcgagccctgcccagtcggcttcttctccaatgtgtcatctgctttcgaaaaatgtcacccttggacaagctgtgagaccaaagacctggttgtgcaacaggcaggcacaaacaagactgatgttgtctgtggtccccaggatcggctgagagccctggtggtgatccccatcatcttcgggatcctgtttgccatcctcttggtgctggtctttatcaaaaaggtggccaagaagccaaccaataaggccccccaccccaagcaggaaccccaggagatcaattttcccgacgatcttcctggctccaacactgctgctccagtgcaggagactttacatggatgccaaccggtcacccaggaggatggcaaagagagtcgcatctcagtgcaggagagacagtgaggctgcacccacccaggagtgtggccacgtgggcaaacaggcagttggccagagagcctggtgctgctgctgctgtggcgtgagggtgaggggctggcactgactgggcatagctccccgcttctgcctgcacccctgcagtttgagacaggagacctggcactggatgcagaaacagttcaccttgaagaacctctcacttcaccctggagcccatccagtctcccaacttgtattaaagacagaggcagaagtttggtggtggtggtgttggggtatggtttagtaatatccaccagaccttccgatccagcagtttggtgcccagagaggcatcatggtggcttccctgcgcccaggaagccatatacacagatgcccattgcagcattgtttgtgatagtgaacaactggaagctgcttaactgtccatcagcaggagactgtataaatatattctaattttatttagccagtctcctgctgatggacagttaagcaggagactggctaaataaaattagaatatatttatacaacagaatctcaaaaacactgttgagtaaggaaaaaaaggcatgctgctgaatgatgggtatggaactttttaaaaaagtacatgcttttatgtatgtatattgcctatggatatatgtataaatacaatatgcatcatatattgatataaagatgtaaagaaaaaaggggc

SEQ ID NO: 46 - DNA, 1639 bp, Homo sapiens
  misc_feature: Incyte ID No: 410442.8
gaggaggagccggagacgccgcggaggagaccggaccgaagacggaccgtgccgggaagagcaggcgggtgaaaatgaaagccggctgtagcatcgtggaaaagccagaaggaggtggagggtatcagtttcctgactgggcctacaaaacagagtcatccccaggctcccggcagatccagctgtggcacttcatcctggagctgctgcagaaggaagagttccgccatgtcatcgcctggcagcagggagagtacggggaatttgtcatcaaggatccagatgaggtggcccgcctctggggccgcaggaaatgcaaaccacagatgaattatgacaagctgagccgggccctcagatactattacaacaagaggatccttcataaaacaaaagggaaaagatttacctataaatttaacttcaacaagctggtgatgcccaactacccattcatcaacattcggtcaagtggtgtggttcctcagagtgcaccaccagtgccaacagcctcttcccggttccatttcccacctctggacacccattctccaaccaatgatgtgcagccgggacggttctctgctagctccctaactgcttctggccaggagtccagtaatggtactgatagaaagactgagctttcagagctggaggatggctcagctgctgactggcgccggggtgtggatcccgtgtcctccaggaatgccattggtggaggagggattggccatcagaaacgcaagcctgacataatgcttcctctgtttgctaggccagggatgtaccctgacccccacagtcccttcgctgtctctccaatccctggccgcggaggtgtccttaatgtccccatttcaccagccctctccctgactcccaccatcttctcctatagcccatcaccaggcctgagccctttcaccagcagcagctgcttctccttcaaccctgaggaaatgaaacactaccttcattctcaagcttgttctgtgttcaactaccatctgagtcctcggacttttccccgttacccagggctcatggttccaccactgcagtgccaaatgcatcctgaggagtcaactcagttctccatcaagctgcagcccccaccagttgggcggaagaaccgggagagggttgagagcagcgaggagtcagcaccagtcaccacgcccaccatggcttctattcccccaagaatcaaggtggaacctgcctctgaaaaggatcctgagagcctcaggcagtcggcacgagagaaggaggagcacactcaagaagagggcactgtgccaagcaggaccattgaagaggaaaaaggcaccatctttgcccgtcctgctgcaccacccatctggccctctgtgcccattagcaccccaagtggagaacctctggaggtgactgaagacagtgaggataggcctggcaaagagcccagtgcacctgagaagaaagaagatgcactgatgccccccaagcttcggttgaagcggcgctggaatgatgaccctgaagcccgagagctgagcaagagtggcaagtttctctggaatgggtcaggaccccagggcttggcaacagcagctgctgatgcttagaactggaagtggattaggagcttttg

SEQ ID NO: 47 - DNA, 2278 bp, Homo sapiens
  misc_feature: Incyte ID No: 1518310CB1
ggctcctctccccgactcggagcccctcggcggcgcccggcccaggacccgcctaggagcgcaggagccccagcgcagagaccccaacgccgagacccccgccccggccccgccgcgcttcctcccgacgcagagcaaaccgcccagagtagaagatggattggggcacgctgcagacgatcctggggggtgtgaacaaacactccaccagcattggaaagatctggctcaccgtcctcttcatttttcgcattatgatcctcgttgtggctgcaaaggaggtgtggggagatgagcaggccgactttgtctgcaacaccctgcagccaggctgcaagaacgtgtgctacgatcactacttccccatctcccacatccggctatgggccctgcagctgatcttcgtgtccacgccagcgctcctagtggccatgcacgtggcctaccggagacatgagaagaagaggaagttcatcaagggggagataaagagtgaatttaaggacatcgaggagatcaaaacccagaaggtccgcatcgaaggctccctgtggtggacctacacaagcagcatcttcttccgggtcatcttcgaagccgccttcatgtacgtcttctatgtcatgtacgacggcttctccatgcagcggctggtgaagtgcaacgcctggccttgtcccaacactgtggactgctttgtgtcccggcccacggagaagactgtcttcacagtgttcatgattgcagtgtctggaatttgcatcctgctgaatgtcactgaattgtgttatttgctaattagatattgttctgggaagtcaaaaaagccagtttaacgcattgcccagttgttagattaagaaatagacagcatgagagggatgaggcaacccgtgctcagctgtcaaggctcagtcgctagcatttcccaacacaaagattctgaccttaaatgcaaccatttgaaacccctgtaggcctcaggtgaaactccagatgccacaatggagctctgctcccctaaagcctcaaaacaaaggcctaattctatgcctgtcttaattttctttcacttaagttagttccactgagaccccaggctgttaggggttattggtgtaaggtactttcatattttaaacagaggatatcggcatttgtttctttctctgaggacaagagaaaaaagccaggttccacagaggacacagagaaggtttgggtgtcctcctggggttctttttgccaactttccccacgttaaaggtgaacattggttctttcatttgctttggaagttttaatctctaacagtggacaaagttaccagtgccttaaactctgttacactttttggaagtgaaaactttgtagtatgataggttattttgatgtaaagatgttctggataccattatatgttccccctgtttcagaggctcagattgtaatatgtaaatggtatgtcattcgctactatgatttaatttgaaatatggtcttttggttatgaatactttgcagcacagctgagaggctgtctgttgtattcattgtggtcatagcacctaacaacattgtagcctcaatcgagtgagacagactagaagttcctagtgatggcttatgatagcaaatggcctcatgtcaaatatttagatgtaattttgtgtaagaaatacagactggatgtaccaccaactactacctgtaatgacaggcctgtccaacacatctcccttttccatgactgtggtagccagcatcggaaagaacgctgatttaaagaggtcgcttgggaattttattgacacagtaccatttaatggggaggacaaaatggggcaggggagggagaagtttctgtcgttaaaaacagatttggaaagactggactctaaattctgttgattaaagatgagctttgtctacttcaaaagtttgtttgcttaccccttcagcctccaattttttaagtgaaaatataactaataacatgtgaaaagaatagaagctaaggtttagataaatattgagcagatctataggaagattgaacctgaatattgccattatgcttgacatggtttccaaaaaatggtactccacatacttcagtgagggtaagtattttcctgttgtcaagaatagcattgtaaaagcattttgtaataataaagaatagctttaatgatatgcttgtaactaaaataattttgtaatgtatcaaatacatttaaaacattaaaatataatctctatagtaacgaacagaaaa

SEQ ID NO: 48 - DNA, 379 bp, Homo sapiens
  misc_feature: Incyte ID No: 405646.17
  unsure 317, 336, 357: a, t, c, g, or other
ctttgctttttctcaaaatgtactttcctctttgtagggctgggactagaatgaggtgagcaaggcacttgccctcgggcgcaatatttaagaaggtgccataaaagtgtagtaatcaaggtccccaggatcggctgagagccctggtggtgatccccatcatcttcgggatcctgtttgccatcctcttggtgctggtctttatcaaaaaggtggccaagaagccaaccaataaggccccccaccccaagcaggaaccccaggagatcaattttcccgacgatcttcctggctccaacactgctgctccagtgcangagactttacatggatgcnaaccggtcacccaggaggatngcaaagagagtcgcatctcagt

SEQ ID NO: 49 - DNA, 4346 bp, Homo sapiens
  misc_feature: Incyte ID No: 1136376.164
accccgcatcttattagcaaccagggagatttctccattttcctcttgtctacagtgcggctacaaatctgggatttttttattacttcttttttttcgaactacacttgggctcctttttttgtgctcgacttttccaccctttttccctccctcctgtgctgctgctttttgatctcttcgactaaaatttttttatccggagtgtatttaatcggttctgttctgtcctctccaccacccccacccccctccctccggtgtgtgtgccgctgccgctgttgccgccgccgctgctgctgctgctcgccccgtcgttacaccaacccgaggctctttgtttcccctcttggatctgttgagtttctttgttgaagaagccagcatgggtgcccagttctccaagaccgcagcgaagggagaagccgccgcggagaggcctggggaggcggctgtggcctcgtcgccttccaaagcgaacggacaggagaatggccacgtgaaggtaaacggcgacgcttcgcccgcggccgccgagtcgggcgccaaggaggagctgcaggccaacggcagcgccccggccgccgacaaggaggagcccgcggccgccgggagcggggcggcgtcgccctccgcggccgagaaaggtgagccggccgccgccgctgcccccgaggccggggccagcccggtagagaaggaggcccccgcggaaggcgaggctgccgagcccggctcgcccacggccgcggagggagaggccgcgtcggccgcctcctcgacttcttcgcccaaggccgaggacggggccacgccctcgcccagcaacgagaccccgaaaaaaaaaaagaagcgcttttccttcaagaagtctttcaagctgagcggcttctccttcaagaagaacaagaaggaggctggagaaggcggtgaggctgaggcgcccgctgccgaaggcggcaaggacgaggccgccgggggcgcagctgcggccgccgccgaggcgggcgcggcctccggggagcaggcagcggcgccgggcgaggaggcggcagcgggcgaggagggggcggcgggtggcgacccgcaggaggccaagccccaggaggccgctgtcgcgccagagaagccgcccgccagcgacgagaccaaggccgccgaggagcccagcaaggtggaggagaaaaaggccgaggaggccggggccagcgccgccgcctgcgaggccccctccgccgccgggcccggcgcgcccccggagcaggaggcagcccccgcggaggagcccgcggccgccgcagcctcgtcagcctgcgcagccccctcacaggaggcccagcccgagtgcagtccagaagcccccccagcggaggcggcagagtaaaagagcaagcttttgtgagataatcgaagaacttttctcccccgtttgtttgttggagtggtgccaggtactggttttggagaacttgtctacaaccagggattgattttaaagatgtctttttttattttacttttttttaagcaccaaattttgttgttttttttttctcccctccccacagatcccatctcaaatcattctgttaaccaccattccaacaggtcgaggagagcttaaacaccttcttcctctgccttgtttctcttttattttttattttttcgcatcagtattaatgtttttgcatactttgcatctttattcaaaagtgtaaactttctttgtcaatctatggacatgcccatatatgaaggagatgggtgggtcaaaaagggatatcaaatgaagtgataggggtcacaatggggaaattgaagtggtgcataacattgccaaaatagtgtgccactagaaatggtgtaaaggctgtctttttttttttttttaaagaaaagttattaccatgtattttgtgaggcaggtttacaacactacaagtcttgagttaagaaggaaagaggaaaaaagaaaaaacaccaatacccagatttaaaaaaaaaaaaacgatcatagtcttaggagttcatttaaaccataggaacttttcacttatctcatgttagctgtaccagtcagtgattaagtagaactacaagttgtataggctttattgtttattgctggtttatgaccttaataaagtgtaattatgtattaccagcagggtgtttttaactgtgactattgtataaaaacaaatcttgatatccagaagcacatgaagtttgcaactttccaccctgcccatttttgtaaaactgcagtcatcttggaccttttaaaacacaaattttaaactcaaccaagctgtgataagtggaatggttactgtttatactgtggtatgtttttgattacagcagataatgctttcttttccagtcgtctttgagaataaaggaaaaaaaatcttcagatgcaatggttttgtgtagcatcttgtctatcatgttttgtaaatactggagaagctttgaccaatttgacttagagatggaatgtaactttgcttacaaaaattgctattaaactcctgcttaaggtgttctaattttctgtgagcacactaaaagcgaaaaataaatgtgaataaaatgtacaaatttgttgtgtttttttatgttctaataatactgagacttctaggtcttaggttaatttttaggaagatcttgcatgccatcaggagtaaattttattgtggttcttaatctgaagttttcaagctctgaaattcataatccgcagtgtcagattacgtagaggaagatcttacaacattccatgtcaaatctgttaccatttattggcatttagttttcatttaagaattgaacataattatttttattgtagctatatagcatgtcagattaaatcatttacaacaaaaggggtgtgaacctaagactatttaaatgtcttatgagaaaatttcataaagccattctcttgtcattcaggtccagaaacaaattttaaactgagtgagagtctatagaatccatactgcagatgggtcatgaaatgtgaccaaatgtgtttcaaaaattgatggtgtattacctgctattgtaattgcttagtgcttggctaatttccaaattattgcataatatgttctaccttaagaaaacaggtttatgtaacaaagtaatggtgttgaatggatgatgtcagttcatgggcctttagcatagttttaagcatcctttttttttttttttgaaagtgtgttagcatcttgttactcaaaggataagacagacaataatacttcactgaatattaataatctttactagtttacctcctctgctctttgccacccgataactggatatcttttccttcaaaggaccctaaactgattgaaatttaagatatgtatcaaaaacattatttcatttaatgcacatctgttttgctgtttttgagcagtgtgcagtttagggttcatgataaatcattgaaccacatgtgtaacaactgaatgccagatcttaaactcattagaaaaataacaaattaggttttgacacgcattcttaattggaataatggatcaaaaatagtggttcatgaccttaccaaacacccttgctactaataaaatcaaataacacttagaagggtatgtatttttagttagggtttcttgatcttggaggatgtttgaaagttaaaaattgaatttggtaaccaaaggactgatttatgggtctttcctatcttaaccaacgttttcttagttacctagatggccaagtacagtgcctggtatgtagtaagactcagtaaaaaagtggatttttaaaaataactcccaaagtgaatagtcaaaaatcctgttagcaaactgttatatattgctaagtttgttcttttaacagctggaatttattaagatgcattattttgattttattcactgcctaaaacactttgggtggtattgatggagttggtggattttcctccaagtgattaaatgaaatttgacgtatcttttcatccaaagttttgtacatcatgttttctaacggaaaaaaatgttaatatggcttttttgtattactaaaaatagctttgagattaaggaaaaataaataactcttgtacagttcagtattgtctattaaatctgtattggcagtatgtataatggcatttgctgtggttacaaaatacttcctctgggttataataatcatttgatccaattcctattgcttgtaaaataaagttttaccagttgatataatcaaaaaaaatctatgtcgggtgcggagaaagaggtaatgaaatggcaggaattcgatatcagcttatcgatacc

SEQ ID NO: 50 - DNA, 2218 bp, Homo sapiens
  misc_feature: Incyte ID No: 233104.1
  unsure 281, 287, 326, 600-621: a, t, c, g, or other
gtttcccaaaaccctgcgcggccggctttgaccgcgctaagatggcgactcccatgcatcggctaatagcccggagacaagcattcgacacagagttgcagcctgtcaagaccttttggatcctgattcagccatccatcgttattagtgaagcaaataagcaacatgtaagatgtcagaaatgcttggaatttggacattggacttatgaatgcacaggaaaaagaaaatacctacataggccctcaaggacagcagaactaaagaaagctttaaaaganaaaganaacagattattattgcaacaaagcattggagaaaccaangtagaaagaaaggccaagaaaaaaaggtctaagagtgtaaccagttccagtagcagtagcagtgacagttctgccagtgattcttcatcagagagtgaagaaacatctacctcttcctcctcagaggacagtgacactgatgaaagctcctctagttcctcatcctcagcctcctccacaacctcttcctcctcctctgattcagactcagattccagctcttccagtagcagtagcaccagcacagatagcagctctgacgatgaaccacccnnnnnnnnnnnnnnnnnnnnnngttgctccattcatattggactgatggactgaaaacattgatgtgattcttgaaagggaatttagaatatgttaaggccaagtaggttaactggtgaacatttctagaattcaaaagtttctaaatgttttacattgtaagagcatagagaatattaataatggcttatagagagagacttttatttgaagggtgaatcttgttttttttatctttaaaatatatctctagaacttaaagctgaaatctgcaaatctgtttgtgtgatgaaactatcttttctctctgtgaaataaatgccatactttgttatatatgttagtggtatgtatcagacatattttcaggatggtgcgtcaggatatctggcagtggatttctaatgcttttggctgtatgttatgtaagatttaatatgttgttactgtaagcttaggagttttcctactattaataaatgtgctctatttttacatttatgttcagaaagttatctgactttttgtcctaagtggtatgttcaaggagcctattaatatatttatagtttttgaatgctgtaagtttcaaattgctgtgttacgtcattcattttcttctggttccttaagtttttcaagttatccttttctgaggaaaattattctagaggaacctaaaaagggacaaaaaaattgaaacttcttaggagtctaatcttggtgccttctgttaaaagtcagtgtatcagaaaagaaagcagccatgtaagaggctaacttaaatagaagtgctagaaatatctttgtgtattaacatgcaataaaaggtaccattcaaagcagggggaaaggtaggaagaagaggtaatttttactgaaaattagggcaatgttggtcgccttttattaaaagctttttttaagctttcataaagattgctttttgctatttttgaaaatatggtattatagtttgtatggtaactggtcatatatgacagtctactgcatatatatgaatgactaggattaatctggtgtgtttacataggatatacatagttgaaatctagcatgaaaggttaaaaaggagatactgcacaatatttcttaaaagtaaaatgctgttattgtgatgagtctttggtttaacatcacagtattctgtgatgtctttttaactttttggaaagaggtatcatttgtagaaaaaatttgatttgggttaaatataggtttttaaaactataaatgttgtcttttttatatttttatgaaaaagcagtagaaaattacttttgaagaaaacaggctatttaaatattgaaatatatgtatgttgtgagtttaaggagcctgtaattgtcagttttacaaaaccatctgtgttcaatggttgtaaataaattctcaaaacatcatttcaaaggctgcctacagaatattatcacttgacagatagagttaataaattaccaatcaggcacattttataatgtttgtctctgtaaaggtaatattagcagttaaagaacacggatgagaaaagaatgtgttacataggttgcatcacttgcagttaaataaaactcacaatttgtgctcacaagcttaaa

SEQ ID NO: 51 - DNA, 1031 bp, Homo sapiens
  misc_feature: Incyte ID No: 2303994CB1
gggaagttgaggctgcagtgaactatgattttaccactgcactccagcttgggcaacaagatgagaccctgtctcaaaaaaaaaaaaaagttttctagaataagcaggatgattgtttaatttgaagatggaacaggaaactagagtgcatttaaaatactctgtcttcattttaacatgttgaatggaataactgcatatcaccatgagtttgttttgcttttcatacagacttgtatgtgtcatttgagtggtttccagattggagcgaggttattctgatctaaatgaacagcatttttttccttagcctctgtttgccactctgggtatctctcctatgggcaaagccattagaaatgcataaaacctcgagacatggtttttggcaaaaactccatgactttaaactagctcttttactactgacctttcacagagaaaaaatatttcccttgaaaaaaactgggcttgtcattttttcccttgtagctttaagcagagacataagtgccttgcattacacatagtaaactttctttaaaaaaaaaaaaaaagattttggagactaccagggtaagattccaacttgtccaaaagctttctggccttacatattttattataaaaattctcaagtctggtaatcttctatgtcagagctagtgatttcaaaaggtttcacaattccccaagacaaaagtgattttcgttcattataataaggttaagtgatatgtgattcataacaattttgatgtgaagaagggaaggacatcattgacttaataatagtatcagtcggtgcaacagttggcaacatgtgccttcacactttaccataaagagacgggtttgagggtttgccttctaaagtctgcaacttcaagaaaaaaaatcgacaccgtggattgaccttcccgggtccactaatataaagccaataaagcttaaaaacacctttggtaacccatgtaatttaactccggtccagtggccctataattccaattaaaaatggttcaatctct

SEQ ID NO: 52 - DNA, 1582 bp, Homo sapiens
  misc_feature: Incyte ID No: 376673.3
  unsure 350-479, 977-1030: a, t, c, g, or other
caacttcctcatcctcctcctacctcccacatattcattaatgcatgcattcatgaaggtaaaagtagttttaacaatatgaactcctgagtcactatgccaatcaaatataatagctatatgtcaaatagagttttcttttcttagtgttggtaatagaataagcctggttcaatgcacatcattggtttattcattttgattaagtttattggtttctttcaagactttttttgtgcttagattactatattattgagattaatttcatacttcaatgtggtagaaagaataatggtttcccaaaatatagccacatcttaatctctaaaagttttgaatacgttttnnnnnnnnnnnnnnnnnnnnnnnnnnnnnnnnnnnnnnnnnnnnnnnnnnnnnnnnnnnnnnnnnnnnnnnnnnnnnnnnnnnnnnnnnnnnnnnnnnnnnnnnnnnnnnnnnnnnnnnnnnnnnnnnnncatgagtgaccatgcctagctcacttccaggtttaacagacaaaataaacttactctagtttccatctctatcattttataataaccgtagcccacattgtagtagtttttcagctctttactaagtcccaccaattcatgttttcacccttaaaatctttctcactgatactctctctggacagaaaaaaggtgaaataagcctactataaggaatatatgacatgctaaattttatttttaaacggttcttcaagtcagattaaagtaataatagcaaattatgtgattatccatgtcccagcctctctccaaaaaaatagtaaacaagatgtcttcttcttttcccaaagatacacatacacacatgtacaaatttttttatcagataataatagctaatatttaatgagtacttaccttagtttgtcccctttacaacagctttacatctgtgtgattgatacagttcatattcccattttataactgagaaannnnnnnnnnnnnnnnnnnnnnnnnnnnnnnnnnnnnnnnnnnnnnnnnnnnnngaaatgctggggtatgaaccaggtagtctgcccccatagctctgccccccagagctgtactgtctcccatgagggtacttctccatggagcagcctgaggcgatccctttattctgggcttctctcagaaatggattcccacacagtattcaaagcaaatttccccagaggaaatcctattggaagaacttaaaaactcagaatctttttctttgtccagagagttgaggaagcttaagctaaatgatacatgttttttaaaaaaaatcagattataaatttagtttttggtgattcattaaattctttactattatagttattttctagctgttcatcttttagctaaatttgttccaaagaagcaaaagtttggtttctactaagttctggattctggatgggagattgcactgtgtgtgacatgcaagtttcatggtgtgggagattgcagagcatttgggttactgcttttactctttggaagctgttatcatctgtatctgctttaaataaagttaaagatttggaacccactaaaaaaaatattta

SEQ ID NO: 53 - DNA, 2776 bp, Homo sapiens
  misc_feature: Incyte ID No: 346511.1
cggcagccagctgagagcaatgggaaatggggagtcccagctgtcctcggtgcctgctcagaagctgggttggtttatccaggaatacctgaagccctacgaagaatgtcagacactgatcgacgagatggtgaacaccatctgtgacgtcctgcaggaacccgaacagttccccctggtgcagggagtggccataggtggctcctatggacggaaaacagtcttaagaggcaactccgatggtacccttgtcctcttcttcagtgacttaaaacaattccaggatcagaagagaagccaacgtgacatcctcgataaaactggggataagctgaagttctgtctgttcacgaagtggttgaaaaacaatttcgagatccagaagtcccttgatgggttcaccatccaggtgttcacaaaaaatcagagaatctctttcgaggtgctggccgccttcaacgctctgagcttaaatgataatcccagcccctggatctatcgagagctcaaaagatccttggataagacaaatgccagtcctggtgagtttgcagtctgcttcactgaactccagcagaagttttttgacaaccgtcctggaaaactaaaggatttgatcctcttgataaagcactggcatcaacagtgccagaaaaaaatcaaggatttaccctcgctgtctccgtatgccctggagctgcttacggtgtatgcctgggaacaggggtgcagaaaagacaactttgacattgctgaaggcgtcagaaccgtactggagctgatcaaatgccaggagaagctgtgtatctattggatggtcaactacaactttgaagatgagaccatcaggaacatcctgctgcaccagctccaatcagcgaggccagtaatcttggatccagttgacccaaccaataatgtgagtggagataaaatatgctggcaatggctgaaaaaagaagctcaaacctggttgacttctcccaacctggataatgagttacctgcaccatcttggaatgttctgcctgcaccactcttcacgaccccaggccaccttctggataagttcatcaaggagtttctccagcccaacaaatgcttcctagagcagattgacagtgctgttaacatcatccgtacattccttaaagaaaactgcttccgacaatcaacagccaagatccagattgtccggggaggatcaaccgccaaaggcacagctctgaagactggctctgatgccgatctcgtcgtgttccataactcacttaaaagctacacctcccaaaaaaacgagcggcacaaaatcgtcaaggaaatccatgaacagctgaaagccttttggagggagaaggaggaggagcttgaagtcagctttgagcctcccaagtggaaggctcccagggtgctgagcttctctctgaaatccaaagtcctcaacgaaagtgtcagctttgatgtgcttcctgcctttaatgcactgggtcagctgagttctggctccacacccagccccgaggtttatgcagggctcattgatctgtataaatcctcggacctcccgggaggagagttttctacctgtttcacagtcctgcagcgaaacttcattcgctcccggcccaccaaactaaaggatttaattcgcctggtgaagcactggtacaaagagtgtgaaaggaaactgaagccaaaggggtctttgcccccaaagtatgccttggagctgctcaccatctatgcctgggagcaggggagtggagtgccggattttgacactgcagaaggtttccggacagtcctggagctggtcacacaatatcagcagctctgcatcttctggaaggtcaattacaactttgaagatgagaccgtgaggaagtttctactgagccagttgcagaaaaccaggcctgtgatcttggacccagccgaacccacaggtgacgtgggtggaggggaccgttggtgttggcatcttctggcaaaagaagcaaaggaatggttatcctctccctgcttcaaggatgggactggaaacccaataccaccttggaaagtgccggtaaaagtcatctaaaggaggcgttgtctggaaatagccctgtaacaggcttgaatcaaagaacttctcctactgtagcaacctgaaattaactcagacacaaataaaggaaacccagctcacaggagcttaaacagctggtcagccccctaagcccccactacaagtgatcctcaggcaggtaaccccagattcatgcactgtagggtgctgcgcacatccctagtctctacccagtagatgccactagccctcctctcccagtgacaaccaaaagtcttcagacattgtcaaacgttcccctgggttcacagatctttctgcctttggcttttggctccaccctctttagctgttaatttgagtacttatggccctgaaagcggccacggtgcctccagatggcaggtttgcaatccaagcaggaagaaggaaaagatacccaaaggtcaagaacacagtgattttattagaagtttcatccgcaaattttcttccatttcattgctcagaaatgtcatgtggttacctgtaacttgaaggtggctacaaagatgactgtggacgtgggttgcactggccacccaaggatgtctgccacacctctccaaagccctccctacctaccaagatatacctgatatattccaccaggatatcctccctccagatatacttggttctctccaccaggttctttctttaaag

SEQ ID NO: 54 - DNA, 1830 bp, Homo sapiens
  misc_feature: Incyte ID No: 1554082CB1
tttgaatcctcgggttccccccaattttaacttttcttttgggaacttcaagggtctctaagggctttttaaaccccgggccaagggtttattaggattacaagcccttctgaggcttctttcagaatcttgtacatggccagtatttgaaatttccctccttaaaccatgtttatgaggttctaccaaagaccattaggtgaaaaagggaaggagtgggatatatgaaaagtagcaaatatgttccttggtttggttaacatcattgatgacaaaataataaggagctatgactggagtcaggagaagttagtgtaataagctggctacacagaaccccactacttaccaggcatggattgaagaagattgtctactcaaatggcatttagacattagaatgtctgggaaaatatttctcaaagacagcaaaaacctctcaaactgaggagcaacatttattcttactaagcagatcatcaatgtatcatgtgcttggcactcaaggatcttccaaaacagaggaccaaccagtcttctgaaggtcatgcccacagaagtcatcagaccttaccaaagtaggttggagaattagattgccttttcatgcagtgagattcagttaagcaaaaatgaaatttgtctctatagctaattagcttatcaactcccctccaaacaaacaattaaaaaaaaaacatacagacactcaaattccacaagctaatgaacaaaagggactcttgtgagaagactaatgagtccctcatccagaagatgccaatgtactggcagattaacatacaacctatgttttgaacaaaaacaaccagcgatacgtaatcaaaatgtaattttcccctaataaaattatggatatgggcagtcatcaatggctgccaaaaccattaagtggaaagctgattaaaaaacaaaaatttctaatggatttatcaaactgtcccaaatcctgataaatattaacatcacagaggaagaccagacattatgggcctggaagtactataggagtgcacacatcacccgtgacatggtcttgccaaataattaaacctgaatttgatcaggtctctggatcttatttgcaattcaaaagaaattttaaaaaaatcctactaacaccaccacaaatatgcaatcagcaatatccagaaaggggaaattcacaggacaaaaacctggttttcttttttggtttcttcaaccaaaaaagaaagaaattgcaaaggaccaaaaaaatgttggggaatctatacattataagggacttaacaactaaagggcaacatatagactttagatcctaatttgagcaaaatctaaaatcaattattaggcaatcagaaaaatttgaacacagactagatatttgaggatattaaggtactatattattgaagattccatggttatgttttttaaagagttcatgccttttagagatacatactaaagtatttgtaaataaatgacatgatctagaatcagtaattttgtgtttggggtgtgggggtggtgaaagggaagtagaaccgaaacaagattagtcctgagttaacaatggctgcaagctggatacatggaattcagcacacttttctccctcttactgattatgcttttgaaattttctcttgtaaaacatttagaaaacaaaaacaaaaaaaatgtgatttgtttctgtcttcaaaatctcattagaattttttcactggaggaagattttcccttgcttctgcataaaattttaactccataacttataagctcactctttattgttactttctaattgacaaataaaaattg

SEQ ID NO: 55 - DNA, 5184 bp, Homo sapiens
  misc_feature: Incyte ID No: 5185743CB1
tggaagtcactaccctcgaggaggaggcagcggcagccgccctcgcgtcgccgcccccggttcggtgcccgcggtcccggagaggaggtgccgccgccaccgccgctccccccctcccgctgccctcgggccgggctgggtcgagctgcgatgccctcggacttcatctcattgctcagcgcggacctagacctggaatcgcccaagtccctctactcgcgagaatctgtctatgatcttctcccaaaggagttacagttacctccatctagagaaacatctgtagcatcaatgagtcagacaagcggtggtgaggcaggctcgcctcctccagctgttgttgctgctgatgcttcttcagctccctcctcttcctccatgggcggtgcttgcagctcctttaccacctcttccagccctaccatttattctacctcagtcaccgacagcaaggctatgcaagtggagagctgctcctcagccgtgggggtaagtaacagaggggtaagtgaaaagcagttaaccagtaacacagttcagcagcatccatcaacaccgaagaggcacacagtcttgtacatctcaccaccacctgaggacttgctggataacagtcggatgtcctgccaggatgaggggtgtggattggaatctgagcagagctgcagtatgtggatggaggattccccctccaacttcagtaacatgagcaccagttcctacaatgataacactgaggtacctcgtaaatcacgaaaacgaaatccaaagcagaggccgggggtcaaacgacgagattgtgaagaatctaatatggatatatttgatgccgacagtgccaaagcacctcactatgtgctttctcagcttaccacggacaacaaaggcaactcaaaagcgggaaatggaacattggaaaaccaaaaaggaactggagtaaagaagagccctatgttgtgtggacaatatcctgttaaaagtgagggaaaggagctgaagatagttgtacaacctgagacacagcaccgagctcggtacctgactgagggcagccgtggctcagtgaaagatagaacacagcaaggctttcctacagtaaagctggaaggccataatgaacctgtagtgttgcaagtgtttgtgggcaacgactctggacgagtgaaaccacatggattttatcaggcctgcagagtaactggacgaaatacaactccttgcaaagaagtggacattgaaggcactactgttatagaagtcggccttgatcctagcaacaacatgacactggcggtggactgcgtagggatattgaaattgaggaatgctgatgtcgaagccagaataggaattgctggttccaagaagaaaagcactcgtgccagattggtttttcgagttaatatcatgaggaaagatggctccactttgacactgcaaacaccctcttctccaattttgtgtactcagccagcaggagtgccagaaatcttaaagaaaagcttgcatagctgttcagtgaaaggagaagaagaagtgtttttaatcggcaagaactttctgaaaggaactaaagttattttccaagaaaatgtttctgatgaaaactcttggaagtcagaagctgaaattgatatggaactatttcatcagaatcatcttattgtgaaggttcctccctatcatgaccaacatataactttgcctgtgtcagtgggaatatatgtagtgacaaatgctggaagatctcatgatgttcaaccattcacttacactccagacccagcagcagctggtgctttgaatgtaaatgtgaagaaggaaatatctagtccagcaagaccttgctcttttgaagaggccatgaaagcaatgaaaactactggatgtaatttagataaggtaaatattatccctaatgccctgatgactccactcataccaagcagtatgattaagagtgaagatgttactccaatggaagtaacagcagaaaaaagatcttccactatttttaagactacaaagtctgttggatcaactcagcaaacattagaaaacatctcaaacatagcaggaaatggctctttttcatcaccatcatcttcccacctaccttctgaaaatgaaaaacagcagcagattcagcccaaggcatacaacccagagaccctgacaactattcaaacccaggacatctcacagcctggtacttttccagcagtttctgcttctagtcagctgcccaacagcgatgcactattgcagcaggctacacagtttcagacaagagaaactcagtctagagagatattacagtcagatggtacagtggttaatttgtcacaactgactgaggcatcacaacaacagcagcagtcaccactacaagaacaagcacagactttacagcagcagatttcatcaaatatttttccatcaccaaatagtgtgagtcagcttcagaatactattcagcagctgcaagcagggagtttcacaggcagtactgctagtggcagcagtggaagtgttgacttggtccaacaagttttagaggcacagcagcagttatcttcagttttattttctgctccagatggtaatgagaatgttcaagagcagcttagtgcagatatttttcaacaagtcagtcaaattcagagtggtgtaagccctggaatgttttcctcaacagagccaacagtccataccagaccagataatttattacctggaagagctgaaagtgttcatccacagtctgaaaacacgttatctaatcaacagcagcagcagcagcagcaacagcaagtgatggaatcttcagccgcaatggtgatggagatgcaacagagtatctgccaggcagctgcccagattcagtcagagttattcccttcaactgcttcagcaaatggaaaccttcagcaatcgccagtttaccagcagacttctcacatgatgagtgcattgtctaccaatgaggatatgcaaatgcagtgtgaattgttttcttctcctcctgcagtttctggaaatgaaacttctacaactaccacacagcaggttgcaacccctggcactaccatgtttcagacatcaagttcaggagatggagaagaaactggaacacaagcaaaacagattcagaacagtgtctttcagaccatggtccaaatgcaacatagtggggacaatcaacctcaagttaaccttttttcatccacaaaaagtatgatgagtgttcagaatagtggtacccaacaacaaggtaatggtttattccagcaagggaatgagatgatgtcacttcaatctggaaattttttgcagcagtcttctcattcacaggcccaactttttcatcctcaaaatcctattgccgatgctcagaacctttcccaggaaactcaaggttctctctttcatagtccaaatcctattgtccacagtcagacttctacaacctcctctgaacaaatgcagcctccaatgtttcactctcaaagtaccattgctgtgttacagggctcttcagttcctcaagaccagcagtcaaccaacatatttctttcccagagtcccatgaataatcttcagactaacacagtagcccaagaagcattttttgcagcaccgaactcaatttctccacttcagtcaacatcaaacagtgaacaacaagctgctttccaacagcaagctccaatatcacacatccagactcctatgctttcccaagaacaggcacaacccccgcagcagggtttatttcagcctcaggtggccctgggctcccttccacctaatccaatgcctcaaagccaacaaggaaccatgttccagtcacagcactcaatagttgccatgcagagtaactctccatcccaggaacagcagcagcagcagcaacagcagcagcaacagcagcagcaacaacaacagagcattttattcagtaatcagaataccatggctacaatggcgtctccaaagcaaccaccaccaaacatgatattcaacccaaatcaaaatccaatggctaatcaggagcaacagaaccagtcaatttttcaccaacaaagtaacatggccccaatgaatcaagagcaacagcccatgcaatttcagagtcagtccacagtttcctcacttcagaacccaggtcctacccagtcggaatcatcacagacccccttgttccatagctctcctcagattcagttggtacaagggtcacctagttctcaagagcagcaagtaactctcttcttatctccagcatccatgtctgccttgcagaccagtataaatcaacaagatatgcaacagtctcctctttattcccctcagaacaacatgcctggaattcaaggagccacatcttcgcctcaaccacaggctactttatttcacaacacagcaggaggcacaatgaaccaactgcagaattctcctggctcatctcagcagacatcaggaatgttcttatttggcattcaaaataactgtagtcagcttttaacctctggaccagctacattgcctgatcagttgatggccataagtcagccaggccaaccacaaaacgagggccagccacctgtgacaacacttctttctcagcaaatgccagagaattctccactggcatcctctataaacaccaaccagaacatcgaaaagattgatttgcttgtttcattgcaaaaccaagggaacaacttgactggctccttttaactggatataaattccacgaagaaaatcctgattccaagatgtcctgagatcttgtggttccatgagaattattactttaaaaacaaaacaaaatataaaaaactgtgtttgagtaaactgatagattttactctgactgcaaaagagcacacctatgctgcttgttgcagtaactaaccaccaatgttaacatcttcatattttatattcctaataacagtgatgactgagaatctatttgagtttccagctggcagaattaattgttattattttcctaggcgcaatttccttaaacgtacagtttaaattcaaggctggaccactcagttattattgctattagaaaataatatatcatgtttacttttgttcttcattattttctttcctgcattgttttagtcaagtaatagcaattgaaaaagtaaacttcaa

SEQ ID NO: 56 - DNA, 2976 bp, Homo sapiens
  misc_feature: Incyte ID No: 899263.12
ggacagctgggatacagccccactcctgagaagagaggtccacaactgtgggaaagaatgatggcctagtttcgcagatagattgtggaagttatcacaccctggcatatgtgcacaccactggtcaggtggtatcttttggtcatggaccaagtgacacaagcaagccaactcatccggaggccctgacagagaactttgacattagctgcctgatttctgctgaagaaactctaagcatggatttatgactttcttttagacctcgtggatgttcaagtcaaacacatttttgctggaacatatgccaactttgtgacaactcatcaggatactagttccacacgtgctcccgggaaaaccctgccagaaataagccgaattagccagtccatggcagaaaaatggatagcagtgaaaagaagaagtactgaacatgaaatggctaaaagtgaaattagaatgatattttcatctcctgcttgtctgactgcaagttttttaaagaaaagaggaactggagaaacgacttccattgatgtggacttagaaatggcaagagataccttcaagaagttaacaaaaaaggaatggatttcttccatgataactacgtgtctcgaggatgatctgctcagagctcttccatgccattctccacaccaagaagctttatcagttttcctcctgctcccagaatgtcctgtgatgcatgattctaagaactggaagaacctggtggttccatttgcaaaggctgtgtgtgaaatgagtaaacaatctttgcaagtcctaaagaagtgttgggcatttttgcaagaatcttctctgaatccgctgatccagatgcttaaagcagccatcatctctcagctgcttcatcagactaaaaccgaacaggatcactgtaatgttaaagctcttttaggaatgatgaaagaactgcataaggtaaacaaagctaactgtcgactaccagaaaatactttcaacataaatgaactctccaacttattaaacttttatatagatagaggaagacagctctttcgggataaccacctgatacctgcagaaacccccagtcctgttattttcagtgattttccatttatctttaattcgctatccaaaattaaattattgcaagctgattcacatataaagatgcagatgtcagaaaagaaagcatacatgcttatgcatgaaacaattctgcaaaaaaaggatgaatttcctccatcacccagatttatacttagagtcagacgaagtcgcctggttaaagatgctctgcgtcaattaagtcaagctgaagctactgacttctgcaaagtattagtggttgaatttattaatgaaatttgtcctgagtctggaggggttagttcagagttcttccactgtatgtttgaagagatgaccaagccagaatatggaatgttcatgtatcctgaaatgggttcctgcatgtggtttcctgccaagcctaaacctgagaagaaaagatatttcctctttggaatgctgtgtggactctccttattcaatttaaatgttgctaaccttcctttcccactggctctgtataaaaaacttctggaccaaaagccatcattggaagatttaaaagaactcagtcctcggttggggaagagtttgcaagaagttctagatgatgctgctgatgacattggagatgcgctctgcatacgcttttctatacactgggaccaaaatgatgttgacttaattccaaatgggatctccatacctgtggaccaaaccaacaagagagactatgtttctaagtatattgattacattttcaacgtctctgtaaaagcagtttatgaggaatttcagagaggattttatagagtctgtgagaaggagatacttagacatttctaccctgaagaactaatgacagcaatcattggaaatactgattatgactggaaacagtttgaacagaattcaaagtatgagcaaggataccaaaaatcacatcctactatacagttgttttggaaggctttccacaaactaaccttggatgaaaagaaaaaattcctctttttccttacaggacgtgataggctgcatgcaagaggcatacagaaaatggaaatagtatttcgctgtcctgaaactttcagtgaaagagatcacccaacatcaataacttgtcataatattctctccctccctaagtattctacaatggaaagaatggaggaagcacttcaagtagccatcaacaacaacagaggatttgtctcacccatgctcacacagtcataatcacctctgagagactcagggtgggctttctcacacttggatccttctgttcttccttacacctaaataatacaagagattaatgaatagtggttagaagtagttgagggagagattgggggaatggggagatgatgatgatggtcaaagggtgcaaaatctcacacaagactgaggcaggagaatagggtacagagatagggatctaaggatgacttggacacactccctggcactgaagagtctgaacactggcctgtgattggtccattccaggaccttcatttgcataaggtatcaaaccacatcagcctctgattggccatgggccagacctgcactctggccaatgattggttcattccaggacattcatttgcataaggagtcaaaccacaccagtcttggattggctgtgagccaattcacctcagtctctaattggctgtgagtcagtctttcatttacatagggtgtaaccatcaagaaacctctacagggtacttaagccccagaagattttgctaccagggctcttgagccacttgctctagcccactcccaccctgtggaatgtactttcacttttgctgcttcactgccttgtgctccaataaatccactccttcaccacccaataaaaaagaaaaatgaaaaagaaaggggggg

SEQ ID NO: 57 - DNA, 274 bp, Homo sapiens
  misc_feature: Incyte ID No: 218602.1
tataattagggatattatcaaaatatgtaaccatgaggcccctcaggtcctgatcagtcacaccagcagacccggccatgtggctgctcggtcctgggtgctcgctgctgtgcaagacattagccctttagttatgagcctgtgggaacttcaggggttcccagtggggagagcagtggcagtgggaggcatctgggggccaaaggtcagtggcagggggtatttcagtattatacaactgctgtgaccagacttgtatactggctgaatatca

SEQ ID NO: 58 - DNA, 3925 bp, Homo sapiens
  misc_feature: Incyte ID No: 4436929CB1
ccgtcctcgaggcgaggagagtaccgggccggcccggctgccgcgcgaggagcgcggtcggcggcctggtctgcggctgagatacacagagcgacagagacatttattgttatttgttttttggtggcaaaaagggaaaatggcgaacgactcccctgcaaaaagtctggtggacatcgacctctcctccctgcgggatcctgctgggatttttgagctggtggaagtggttggaaatggcacctatggacaagtctataagggtcgacatgttaaaacgggtcagttggcagccatcaaagttatggatgtcactgaggatgaagaggaagaaatcaaactggagataaatatgctaaagaaatactctcatcacagaaacattgcaacatattatggtgctttcatcaaaaagagccctccaggacatgatgaccaactctggcttgttatggagttctgtggggctgggtccattacagaccttgtgaagaacaccaaagggaacacactcaaagaagactggatcgcttacatctccagagaaatcctgaggggactggcacatcttcacattcatcatgtgattcaccgggatatcaagggccagaatgtgttgctgactgagaatgcagaggtgaaacttgttgactttggtgtgagtgctcagctggacaggactgtggggcggagaaatacgttcataggcactccctactggatggctcctgaggtcatcgcctgtgatgagaacccagatgccacctatgattacagaagtgatctttggtcttgtggcattacagccattgagatggcagaaggtgctccccctctctgtgacatgcatccaatgagagcactgtttctcattcccagaaaccctcctccccggctgaagtcaaaaaaatggtcgaagaagttttttagttttatagaagggtgcctggtgaagaattacatgcagcggccctctacagagcagcttttgaaacatccttttataagggatcagccaaatgaaaggcaagttagaatccagcttaaggatcatatagatcgtaccaggaagaagagaggcgagaaagatgaaactgagtatgagtacagtgggagtgaggaagaagaggaggaagtgcctgaacaggaaggagagccaagttccattgtgaacgtgcctggtgagtctactcttcgccgagatttcctgagactgcagcaggagaacaaggaacgttccgaggctcttcggagacaacagttactacaggagcaacagctccgggagcaggaagaatataaaaggcaactgctggcagagagacagaagcggattgagcagcagaaagaacagaggcgacggctagaagagcaacaaaggagagagcgggaagctagaaggcagcaggaacgtgaacagcgaaggagagaacaagaagaaaagaggcgtctagaggagttggagagaaggcgcaaagaagaagaggagaggagacgggcagaagaagaaaagaggagagttgaaagagaacaggagtatatcaggcgacagctagaagaggagcagcggcacttggaagtccttcagcagcagctgctccaggagcaggccatgttactgcatgaccataggaggccgcacccgcagcactcgcagcagccgccaccaccgcagcaggaaaggagcaagccaagcttccatgctcccgagcccaaagcccactacgagcctgctgaccgagcgcgagaggtggaagatagatttaggaaaactaaccacagctcccctgaagcccagtctaagcagacaggcagagtattggagccaccagtgccttcccgatcagagtctttttccaatggcaactccgagtctgtgcatcccgccctgcagagaccagcggagccacaggttcctgtgagaacaacatctcgctcccctgttctgtcccgtcgagattccccactgcagggcagtgggcagcagaatagccaggcaggacagagaaactccaccagcagtattgagcccaggcttctgtgggagagagtggagaagctggtgcccagacctggcagtggcagctcctcagggtccagcaactcaggatcccagcccgggtctcaccctgggtctcagagtggctccggggaacgcttcagagtgagatcatcatccaagtctgaaggctctccatctcagcgcctggaaaatgcagtgaaaaaacctgaagataaaaaggaagttttcagacccctcaagcctgctggcgaagtggatctgaccgcactggccaaagagcttcgagcagtggaagatgtacggccacctcacaaagtaacggactactcctcatccagtgaggagtcggggacgacggatgaggaggacgacgatgtggagcaggaaggggctgacgagtccacctcaggaccagaggacaccagagcagcgtcatctctgaatttgagcaatggtgaaacggaatctgtgaaaaccatgattgtccatgatgatgtagaaagtgagccggccatgaccccatccaaggagggcactctaatcgtccgccagactcagtccgctagtagcacactccagaaacacaaatcttcctcctcctttacaccttttatagaccccagattactacagatttctccatctagcggaacaacagtgacatctgtggtgggattttcctgtgatgggatgagaccagaagccataaggcaagatcctacccggaaaggctcagtggtcaatgtgaatcctaccaacactaggccacagagtgacaccccggagattcgtaaatacaagaagaggtttaactctgagattctgtgtgctgccttatggggagtgaatttgctagtgggtacagagagtggcctgatgctgctggacagaagtggccaagggaaggtctatcctcttatcaaccgaagacgatttcaacaaatggacgtacttgagggcttgaatgtcttggtgacaatatctggcaaaaaggataagttacgtgtctactatttgtcctggttaagaaataaaatacttcacaatgatccagaagttgagaagaagcagggatggacaaccgtaggggatttggaaggatgtgtacattataaagttgtaaaatatgaaagaatcaaatttctggtgattgctttgaagagttctgtggaagtctatgcgtgggcaccaaagccatatcacaaatttatggcctttaagtcatttggagaattggtacataagccattactggtggatctcactgttgaggaaggccagaggttgaaagtgatctatggatcctgtgctggattccatgctgttgatgtggattcaggatcagtctatgacatttatctaccaacacatatccagtgtagcatcaaaccccatgcaatcatcatcctccccaatacagatggaatggagcttctggtgtgctatgaagatgagggggtttatgtaaacacatatggaaggatcaccaaggatgtagttctacagtggggagagatgcctacatcagtagcatatattcgatccaatcagacaatgggctggggagagaaggccatagagatccgatctgtggaaactggtcacttggatggtgtgttcatgcacaaaagggctcaaagactaaaattcttgtgtgaacgcaatgacaaggtgttctttgcctctgttcggtctggtggcagcagtcaggtttatttcatgaccttaggcaggacttctcttctgagctggtagaagcagtgtgatccagggattactggcctccagagtcttcaagatcctgagaacttggaattccttgtaactggagctcggagctgcaccgagggcaaccaggacagctgtgtgtgcagacctcatgtgttgggttctctcccctcc

SEQ ID NO: 59 - DNA, 906 bp, Homo sapiens
  misc_feature: Incyte ID No: 222981.14
gcagctgctgctgcagcacggcgccaacgtgaacgcgcaaatgtactccggcagctccgccctgcactcagcgtccggccgcgggctcctcccgctggtgcgcacgctggtccgcagcggcgctgacagcagcctcaagaactgccacaacgacacgccgctcatggtggcgcgcaccgcagggtgagccggggcagctgtggacatgccccttgcacacgtgtgtccgcgggctggttgcaggcgagtgtgccagagcgcagaggagtgagggtgtctgtgccgttgcgtggaggggagtgggtgagcctctgaaagcgcgggtgtgagttccagaaatgaggagagactggcaccaagaaaaaaagtgccttgcccatcttttcatactgagaagtggagaggccaccacctggatccagtgagctaggagggatgggagagaggactgtgaggcatgggtggctctatggtcacgcccatcttcctacaggtcatcgacatcctgagggggaaggccacccggcctgcttccacctcccagccagacccctcccctgaccggagcgccaacacctcccccgagagcagcagccgcctcagctccaatggtcttctctccgcatcaccatcctcctcaccctcccagtctccccccagggacccccctggattccccatggctcctcccaatttcttccttccttccccatctccacccgccttcctgccctttgctggggtcctccgaggccctggccggccggtgcccccctccccagctccaggaggcagctgagggggatgggggggcagatcttggactcatgaggaggggcccccctgccctgtggggtcaacccttctggaaactgtgaagatctcactctgccccccccccccaat

SEQ ID NO: 60 - DNA, 1189 bp, Homo sapiens
  misc_feature: Incyte ID No: 1453496.9
agagaaacataagctagactgaaacataggggcaacactttcactgtgcttttcaatccaaaataattttcctaagagcccactatgtaccacacactattgagcacttgggattaaaaaaaagttctccagaggctttccagtctagtgccatgtgtctcagtcttggtgctactggtattcggggcttcagaattattagttggggattggtggggtggggagctttcctgtgcttcgtaggaggttcagcaacacctctggcttctaccaaatagataccagtaagcacatgcaccctcacagccagatgggacaatcagcaatgtcttcagccattgccaggggacagaatcatcctcgattgaaagcatctggtctaaggggaaagaccagtgtggaagtcagacaggaagtcactggcaggctagtatcctttggatgaacagtttacttactataagttgtcctggtcaaggcagctgggcagaaggcactggtggggagggtgaaggggttcttagtaattctgcttctttagtctgtacctgaaacacagtcattgattttacccactgagtggcctttaggggaagtgtatcatttccctctccttcctctctccctctggcatatggctcagcatttcctcacccgtttcacatgagcagatttgacacgttgctctgtccccagacttgcataacagcaaaaagctttatgcagtctggatggattcacaaaattaagccagtgggcagcagagtaataatccgtcagcttaggtgatataaaaggtcttgattagcccaggataatacatagtacatgctgaaggccctcttattccacggtatttatttgccattgcaagtatcttcctactacttcattctagaatagacaagcaatgtttaatgtatgagtctgcatttcacaagatcagtgtaataaacttaaccacattttgtctttttacagatgaacacagtatagagcatgaatttttttcatcttctctggcgacagttttccttctcatctgtgattccctcctgctactctgttccttcacatcctgtgtttctagggaaatgaaagaaaggccagcaaattcgctgcaacctgttgatagcaagtgaatttttctctaactcagaaacatcagttactctgaagggcatcatgc

SEQ ID NO: 61 - DNA, 1201 bp, Homo sapiens
  misc_feature: Incyte ID No: 020293CB1
cctcggaattcggctcgagcagagctcaagtctgaactctacctccagacagaatgaagttcatctcgacatctctgcttctcatgctgctggtcagcagcctctctccagtccaaggtgttctggaggtctattacacaagcttgaggtgtagatgtgtccaagagagctcagtctttatccctagacgcttcattgatcgaattcaaatcttgccccgtgggaatggttgtccaagaaaagaaatcatagtctggaagaagaacaagtcaattgtgtgtgtggaccctcaagctgaatggatacaaagaatgatggaagtattgagaaaaagaagttcttcaactctaccagttccagtgtttaagagaaagattccctgatgctgatatttccactaagaacacctgcattcttcccttatccctgctctggattttagttttgtgcttagttaaatcttttccaggaaaaagaacttccccatacaaataagcatgagactatgtaaaaataaccttgcagaagctgatggggcaaactcaagcttcttcactcacagcaccctatatacacttggagtttgcattcttattcatcagggaggaaagtttctttgaaaatagttattcagttataagtaatacaggattattttgattatatacttgttgtttaatgtttaaaatttcttagaaaacaatggaatgagaatttaagcctcaaatttgaacatgtggcttgaattaagaagaaaattatggcatatattaaaagcaggcttctatgaaagactcaaaaagctgcctgggaggcagatggaacttgagcctgtcaagaggcaaaggaatccatgtagtagatatcctctgcttaaaaactcactacggaggagaattaagtcctacttttaaagaatttctttataaaatttactgtctaagattaatagcattcgaagatccccagacttcatagaatactcagggaaagcatttaaagggtgatgtacacatgtatcctttcacacatttgccttgacaaacttctttcactcacatctttttcactgactttttttgtggggggcggggccggggggactctggtatctaattctttaatgattcctataaatctaatgacattcaataaagttgagcaaacattttacttaaaaaaaaaaataataaaagagaaa

SEQ ID NO: 62 - DNA, 823 bp, Homo sapiens
  misc_feature: Incyte ID No: 135626CB1
ataagacctacctgtgctacgaagtggagcgcctggacaatggcacctcggtcaagatggaccagcacaggggctttctacacaaccaggctaagaatcttctctgtggcttttacggccgccatgcggagctgcgcttcttggacctggttccttctttgcagttggacccggcccagatctacagggtcacttggttcatctcctggagcccctgcttctcctggggctgtgccggggaagtgcgtgcgttccttcaggagaacacacacgtgagactgcgcatcttcgctgcccgcatctatgattatgaccccctatataaggaggcgctgcaaatgctgcgggatgctggggcccaagtctccatcatgacctacgatgagtttgagtactgctgggacacctttgtgtaccgccagggatgtcccttccagccctgggatggactagaggagcacagccaagccctgagtgggaggctgcgggccattctccagaatcagggaaactgaaggatgggcctcagtctctaaggaaggcagagacctgggttgagcagcagaataaaagatcttcttccaagaaatgcaaacagaccgttcaccaccatctccagctgctcacagacaccagcaaagcaatgtgctcctgatcaagtagattttttaaaaatcagagtcaattaattttaattgaaaatttctcttatgttccaagtgtacaagagtaagattatgctcaatattcccagaatagttttcaatgtattaatgaagtgattaattggctccatatttagactaataaaacattaagaatc

SEQ ID NO: 63 - DNA, 416 bp, Homo sapiens
  misc_feature: Incyte ID No: 244262.2
  unsure 362: a, t, c, g, or other
gtcctgtctctgctgtgctgacagagctgcgttgcacttgtttacgcgttacgctgagagtaaaccccaaaacgattggtaaactgcaggtgttccccgcaggcccgcagtgctccaaggtggaagtggtgtaagttctcctgtgttgctgtgtccactgtgacttaggcaagtcctccagcctgggtcgtcaacctttgtggctcatgggtgcatcctctttttctttacttcagagcctccctgaagaacgggaagcaagtttgtctggacccggaagccccttttctaaagaaagtcatccagaaaattttggacagtggaaacaagaaaaactgagtaacaaaaaagaccatgcatcntaaaattgcccagtcttcagcggacagttttctggagatccctggaacccagta

SEQ ID NO: 64 - DNA, 2670 bp, Homo sapiens
  misc_feature: Incyte ID No: 1330247.162
  unsure 2534, 2605: a, t, c, g, or other
gcagtctggttggagctgttgtcttgtatgctcagcgaggcccggagagacccgggagagagctaggccgagtccaccgcccgagtctgctgcccgagcccgcgttacgcacaaagccgccgatccccggcctggggtgagcagagcgaccaccgcccgggagcagcgcggcgagacgcacggtgcgccctatgcccccgcgcccccaccgcccccgccgcggcagccgaagcgcagcgagagaacgcgccaccgcggggcccgggtgcagctagcgaccctctcgccacctgcgcgcagcccgaggtgagcagtgagcggcgagcgggagggcagcgaggcgttcgcgggccccctcctgctgcccgggcccggcccgctcatggcggccatccgcaagaagctggtggtggtgggcgacggcgcgtgtggcaagacgtgcctgctgatcgtgttcagtaaggacgagttccccgaggtgtacgtgcccaccgtcttcgagaactatgtggccgacattgaggtggacggcaagcaggtggagctggcgctgtgggacacggcgggccaggaggactacgaccgcctgcggccgctctcctacccggacaccgacgtcattctcatgtgcttctcggtggacagcccggactcgctggagaacatccccgagaagtgggtccccgaggtgaagcacttctgtcccaatgtgcccatcatcctggtggccaacaaaaaagacctgcgcagcgacgagcatgtccgcacagagctggcccgcatgaagcaggaacccgtgcgcacggatgacggccgcgccatggccgtgcgcatccaagcctacgactacctcgagtgctctgccaagaccaaggaaggcgtgcgcgaggtcttcgagacggccacgcgcgccgcgctgcagaagcgctacggctcccagaacggctgcatcaactgctgcaaggtgctatgagggccgcgcccgtcgcgcctgcccctgccggcacggctccccctcctggaccagtcccccgcgagcccggagaaggggagacccgtgtcccacaaggaccccaccggcctgcctggcatctgtctgctgacgcctctggcttgcgccaggacttggcgtgggcaccgggcgcccccatcccagtgtctgtgtgcgtccagctgtgttgcacaggcctgggctccccactgagtgccaagggtcccctgagcatgcttttctgaagagccgggcctcagagtgtgtggctgtgtgtctgttcgactcccctcgccccattttcaccccacccccgcctctgatccccgggggcgagattggcgcgggagtgtggccgcgccccatcagatgttcgcccttcaccagcgggagcttgatatcccttgtctgtaacatagaccccgggtactgcgggaggggagggctgctggggaggatggggggatgttatataaatatagatataattttattttcggagctaagatggtgttatttaagggtggtgatgggtgagcgctctggcccaggctgggccagactcccgcccaagcatgaacaggacttgaccatctttccaacccctggggaagacatttgcaactgacttggggaggacacagcttcagcacagcctctcctgcgggccagcccgctgcgaaccctccaccagctaccggagggaggagggaggatgcgctgtggggttgtttttgccataagcgaactttgtgcctgtcctagaagtgaaaattgttcagtccaagaaactgatgttatttgatttatttaaaggctaaaatttgtttttttattctttgcacaattgtttcattgtttgacacttaatgcactcgtcatttgcatacgacagtagcattctgaccacacttgtacgctgtaacctcatctacttctgatgtttttaaaaaatgacttttaacaaggagagggaaaagaaacccactaaattttgctttgtttccttgaagaatgtggcaacactgttttgtgattttatttgtgcaggtcatgcacacagttttgataaagggcagtaacaagtattggggcctattttttttttttttccacaaggcattctctaaagctatgtgaaattttctctgcacctctgtacagagaatacacctgcccctgtatatccttttttcccctcccctccctcccagtggtacttctactaaattgttgtcttgttttttattttttaaataaactgacaaatgacaaaatggtgagcttatgatgtttacataaaagttctataagctgtgtatacagttttttatgtaaaatattaaaagactatgatgatgacatttataaaatggctcttgtggtttaatagtgtgtaaaaatacccttgtgaatttggaacaagggagatattctcctaggcgagatcctttcttgccaactccgtttcccttatagcaaatgtagtaaatgaggatgaagtccctttgagagcatgtgggggttgggtgaccaagggagnccaggttgttcctgtcacattcctagaggaagatgagtggataccccgacacccagtgcaaaaacttttgncctattatgtactcagttcaattgggtgagaccgaagatcttgatttcattcatctgtgtgtctt

SEQ ID NO: 65 - DNA, 3137 bp, Homo sapiens
  misc_feature: Incyte ID No: 1377892.2
gcgggagaacgataatgcaaagtgctatgttcttggctgttcaacacgactgcagacccatggacaagagcgcaggcagtggccacaagagcgaggagaagcgagaaaagatgaaacggaccctgtgagtatggctttcttccctctcccgccaccccctgccccacactgcaagctgcaaacgcggtactttcgggctcgcctttgacgttaggaaactagcctgagcctatgcagggaaaaaaaatcgaaaaggtcaatttgttaagtaaggttaaatctgggtgatgctcgggtacagtttaagaaccgagggagacagttgatatgagggcggtggttgatgcgctaagaaattgcgggttggctttttgtcctcctgcattcaaaatgacatcagaatcctgcggctgaagcgcgtccccagcattcatacgttgcatgatgagttctcatcagcttacacagctactggaaggtgatgctcttgctggttctgaatatactcgtttaaaatccatttttgttttttaattatagagcagatctcacccagtccgaatgtggaacaaataattgttatgcagcgtctgcttaaaagaagtgtcgtaggtggggaaggaagagcgcaggggaatcagtcacccacctctttgtacagtctctggcgtggtccagaacctcctgctctaaagagagaagcgtgggccggctccagacagttccatgtctgtccttttcattaaagtgcaaaacgtctcggaattgtaattaaccttgcaaacaaactgatgccctttgtgagccagaaatagtgtctgccttttgaactaaattcattaacaattctttaaaataccctagtgattataggtagccctgcccttagttgtaaaactagtagatacggtcagattaatggacgaaactgctcagtacatgaggtttaaatgttaggtggataagacttatttgaagagttcttgctttgccttatgcggtttgtctctagttactgggtgactttatttggtaaaaatgcgttcagctgcagtagcatattcaagtgttgctagttagtaattatctttttaattttttgttttagtttaaaagattggaagacccgtttgagctacttcttacaaaattcctctactcctgggaagcccaaaaccggcaaaaaaagcaaacagcaagctttcatcaagccttctcctgaggaagcacagctgtggtcagaagcatttgacgagctgctagccagcaaatgtaagttaactcttgagcttgagccattgctaacatcgcaaaagcctggaaaggctgcgtccacctaacaaaagagcagcttgcctgagggggattagactgcagtcactataggataaagcctgtttttctttcctttatttcccagggtttaacaaataaatgcatatattctctccaggtggggaagaaaatcagcctaaacaaattaaagtggcagttgcttatagttaaggttgagtcagtttttccattgcatacaatgttttcaagaggcttagttcccagagaatttatggctcccctataaatatttactttgcattgacagcaaagtacttatatttttgcagcagagtgccaacataagccttttgcctactggtatcttagtctttaaaaagctaaattttgagaattacaggtttgagcgaaatctagaaaattcatttagaaataattaaaatgtgagggataggagaaacataaggaatcatttggtctctcagttcttcacattctgcatgctctcttttctccccccttcagatggtcttgctgcattcagggcttttttaaagtcggaattctgtgaagaaaatattgaattctggctggcctgtgaagacttcaaaaaaaccaaatcaccccaaaagctgtcctcaaaagcaaggaaaatatatactgacttcatagaaaaggaagctccaaaagaggtaaggaaacaagttcctaatttcagcacaatctggacatctttagcacaaaagtgaaacaaagtaatcaaggacaaagcgggctaggaggggtaaaaagtccctccacgttgtagctttcagttatgttaaagttctcctgtgacttagctagtaaagctaatcacacataatttttattttttgttttcaaatactaaattttaatctttaactctgaataccaaataaacaacttttttgttttatttcagataaacatagattttcaaaccaaaactctgattgcccagaatatacaagaagctacaagtggctgctttacaactgcccagaaaagggtatacagcttgatggagaacaactcttatcctcgtttcttggagtcagaattctaccaggacttgtgtaaaaagccacaaatcaccacagagcctcatgctacatgaaatgtaaaagggagcccagaaatggaggacatttcattctttttcctgaggggaaggactgtgacctgccataaagactgaccttgaattcagcctgggtgttcaggaaacatcactcagaactattgattcaaagttgggtagtgaatcaggaagccagtaactgactaggagaagctggtatcagaacagcttccctcactgtgtacagaacgcaagaagggaataggtggtctgaacgtggtgtctcactctgaaaagcaggaatgtaagatgatgaaagagacaatgtaatactgttggtccaaaagcatttaaaatcaatagatctgggattatgtggccttaggtagctggttgtacatctttccctaaatcgatccatgttaccacatagtagttttagtttaggattcagtaacagtgaagtgtttactatgtgcaacggtattgaagttcttatgaccacagatcatcagtactgttgtctcatgtaatgctaaaactgaaatggtccgtgtttgcattgttaaaaatgatgtgtgaaatagaatgagtgctatggtgttgaaaactgcagtgtccgttatgagtgccaaaaatctgtcttgaaggcagctacactttgaagtggtctttgaatacttttaataaatttattttgataaataatattgaaaaaaaaaaaaaaagcggccgc

SEQ ID NO: 66 - DNA, 730 bp, Homo sapiens
  misc_feature: Incyte ID No: 1446506.1
ccaagtcggccttgtagcgctggaccaaagtcaggaggcactggtgccacagcacaggcagttcacgcttctctgtccggaaccccaggaagtggaagactagggcatccagcacccggctggcagttgcatggaagagaacacctctttatggcttaccctctagaatttctaatttatgtgttctgttgaaatttttgtttttttacctttattgaaacaacaaaaagtcagtattgaaacatatcttcctgttttctgttgtcaaatgatgataatgtgccatgatgttttatatatatcattcagaaaaagttttattttttaataacattctattaacattattttgcttgccgctggcatgcctgaggaatgtatttggctttgattacacactaagtttttgtaataaatttgactcattaaaaaccttttttttttaaaaaaaaaaaaaagaaaatctcattagtgaacttatctttgcagctgagtacttaaattctttttaaaaagataccctttggattgatcacattgtttgacccagtatgtcttgtagacacgttagttataatcaccttgtatctctaaatatggtgtgatatgaaccagtccattcacattggaaaaactgatggttttaaataaactaattcactagcaaaaaaatctatgtcgggtgcggagaaagaggtaatgaaatggcaggaattcgatagcagcttat

SEQ ID NO: 67 - DNA, 52 bp, Homo sapiens
  misc_feature: Incyte ID No: 053959.1
aggcaatgaaccctctgcaccacctcttacctgcccagatctgactcctaga

SEQ ID NO: 68 - DNA, 1666 bp, Homo sapiens
  misc_feature: Incyte ID No: 223092.1
  unsure 1347, 1358: a, t, c, g, or other
ccctcagcaaggacagcagaggaccagctaagagggagagaagcaactacagaccccccctgaaaacaaccctcagacgccacatcccctgacaagctgccaggcaggttctcttcctctcacatactgacccacggctccaccctctctcccctggaaaggacaccatgagcactgaaagcatgatccgggacgtggagctggccgaggaggcgctccccaagaagacaggggggccccagggctccaggcggtgcttgttcctcagcctcttctccttcctgatcgtggcaggcgccaccacgctcttctgcctgctgcactttggagtgatcggcccccagagggaagagttccccagggacctctctctaatcagccctctggcccaggcagtcagatcatcttctcgaaccccgagtgacaagcctgtagcccatgttgtagcaaaccctcaagctgaggggcagctccagtggctgaaccgccgggccaatgccctcctggccaatggcgtggagctgagagataaccagctggtggtgccatcagagggcctgtacctcatctactcccaggtcctcttcaagggccaaggctgcccctccacccatgtgctcctcacccacaccatcagccgcatcgccgtctcctaccagaccaaggtcaacctcctctctgccatcaagagcccctgccagagggagaccccagagggggctgaggccaagccctggtatgagcccatctatctgggaggggtcttccagctggagaagggtgaccgactcagcgctgagatcaatcggcccgactatctcgactttgccgagtctgggcaggtctactttgggatcattgccctgtgaggaggacgaacatccaaccttcccaaacgcctcccctgccccaatccctttattaccccctccttcagacaccctcaacctcttctggctcaaaaagagaattgggggcttagggtcggaacccaagcttagaactttaagcaacaagaccaccacttcgaaacctgggattcaggaatgtgtggcctgcacagtgaagtgctggcaaccactaagaattcaaactggggcctccagaactcactggggcctacagctttgatccctgacatctggaatctggagaccagggagcctttggttctggccagaatgctgcaggacttgagaagacctcacctagaaattgacacaagtggaccttaggccttcctctctccagatgtttccagacttccttgagacacggagcccagccctccccatggagccagctccctctatttatgtttgcacttgtgattatttattatttatntattatttatntatttacagatgaatgtatttatttgggagaccggggtatcctgggggacccaatgtaggagctgccttggctcagacatgttttccgtgaaaacggagctgaacaataggctgttcccatgtagccccctggcctctgtgccttcttttgattatgttttttaaaatatttatctgattaagttgtctaaacaatgctgatttggtgaccaactgtcactcattgctgagcctctgctccccaggggagttgtgtctgtaatcgccctactattcagtggcgagaaataaagtttgcttagaaaaga

SEQ ID NO: 69 - DNA, 936 bp, Homo sapiens
  misc_feature: Incyte ID No: 335430.4
gtctcacttttcccagcttcctctctttactaatacctagttgtcttgtgttatgcatttgcttagaagcatgctcctttgttttctaggttgacagctaactcacatggtaagtaaatattatgggacttaaggataaagaaatacttccttaatctaccctgtccccctaactttaagacctttccccccaaaaaatgaaagatttgagtaatggccttctggaaataatcctctatagtgtggctgatgtttggtgaagtatattttaagccagcttgtagttgtttatttaggagtcaggcatgtccaaagctaatgttatgttattgcttatcttgtactgatgattctttgggtgaacttagttgaggagttctggggaatactctgtatactgatgttatcattcttcctccaaggtgtgtgacatatatataaattataaccttccattagtggtattgtttcctcctgggatcttctattctgcactcctcagcctggataccagcatcctgaaccagctgtgttttattatgcacagatatcgtaaaaatttgactgccgcaaagaaaaatgagttggtacaaaagacaaaatcagagttcaatttcagcagcaagacttatcaagaatttaatcactatttgacatcaatggttggttgcctgtggacgtccaaaccctttgggaaaggaatatatattgaccctgaaatcctagaaaaaactggagtggctgaatataaaaacagtttaaatgtagtccatcatccttctttcttgagttacgctgtttcctttttgctacaggaaagggtatttaaagaatttttagattttgtatcttaatactgtggtggcagaaataggaagtgccataaatttaatgtgtctgaattgtaagacgtgtgtctagtaattttttttaagt

SEQ ID NO: 70 - DNA, 4017 bp, Homo sapiens
  misc_feature: Incyte ID No: 1398075.7
  unsure 3473-3495: a, t, c, g, or other
ggctggataagggctcagagttgcactgagtgtggctgaagcagcgaggcgggagtggaggtgcgcggagtcaggcagacagacagacacagccagccagccaggtcggcagtatagtccgaactgcaaatcttattttcttttcaccttctctctaactgcccagagctagcgcctgtggctcccgggctggtgtttcgggagtgtccagagagcctggtctccagccgcccccgggaggagagccctgctgcccaggcgctgttgacagcggcggaaagcagcggtacccacgcgcccgccgggggaagtcggcgagcggctgcagcagcaaagaactttcccggctgggaggaccggagacaagtggcagagtcccggagcgaacttttgcaagcctttcctgcgtcttaggcttctccacggcggtaaagaccagaaggcggcggagagccacgcaagagaagaaggacgtgcgctcagcttcgctcgcaccggttgttgaacttgggcgagcgcgagccgcggctgccgggcgccccctccccctagcagcggaggaggggacaagtcgtcggagtccgggcggccaagacccgccgccggccggccactgcagggtccgcactgatccgctccgcggggagagccgctgctctgggaagtgagttcgcctgcggactccgaggaaccgctgcgcccgaagagcgctcagtgagtgaccgcgacttttcaaagccgggtagcgcgcgcgagtcgacaagtaagagtgcgggaggcatcttaattaaccctgcgctccctggagcgagctggtgaggagggcgcagcggggacgacagccagcgggtgcgtgcgctcttagagaaactttccctgtcaaaggctccggggggcgcgggtgtcccccgcttgccagagccctgttgcggccccgaaacttgtgcgcgcagcccaaactaacctcacgtgaagtgacggactgttctatgactgcaaagatggaaacgaccttctatgacgatgccctcaacgcctcgttcctcccgtccgagagcggaccttatggctacagtaaccccaagatcctgaaacagagcatgaccctgaacctggccgacccagtggggagcctgaagccgcacctccgcgccaagaactcggacctcctcacctcgcccgacgtggggctgctcaagctggcgtcgcccgagctggagcgcctgataatccagtccagcaacgggcacatcaccaccacgccgacccccacccagttcctgtgccccaagaacgtgacagatgagcaggagggcttcgccgaggggcttcgtgcgcgccctggccgaactgcacagccagaacacgctgcccagcgtcacgccggcggcgcagccggtgcaacggggcaggcatggtggctcccgcggtagcctcggtggcagggggcagcggcagcggcggcttcagcgccagcctgcacagcgagccgccggtctacgcaaacctcagcaacttcaacccaggcgcgctgagcagcggcggcggggcgccctcctacggcgcggccggcctggcctttcccgcgcaaccccagcagcagcagcagccgccgcaccacctgccccagcagatgcccgtgcagcacccgcggctgcaggccctgaaggaggagcctcagacagtgcccgagatgcccggcgagacaccgcccctgtcccccatcgacatggagtcccaggagcggatcaaggcggagaggaagcgcatgaggaaccgcatcgctgcctccaagtgccgaaaaaggaagctggagagaatcgcccggctggaggaaaaagtgaaaaccttgaaagctcagaactcggagctggcgtccacggccaacatgctcagggaacaggtggcacagcttaaacagaaagtcatgaaccacgttaacagtgggtgccaactcatgctaacgcagcagttgcaaacattttgaagagagaccgtcgggggctgaggggcaacgaagaaaaaaaataacacagagagacagacttgagaacttgacaagttgcgacggagagaaaaaagaagtgtccgagaactaaagccaagggtatccaagttggactgggttgcgtcctgacggcgcccccagtgtgcacgagtgggaaggacttggcgcgccctcccttggcgtggagccagggagcggccgcctgcgggctgccccgctttgcggacgggctgtccccgcgcgaacggaacgttggacttttcgttaacattgaccaagaactgcatggacctaacattcgatctcattcagtattaaaggggggagggggagggggttacaaactgcaatagagactgtagatgcttctgtagtactccttaagaacacaaagcggggggagggttggggaggggcggcaggagggaggtttgtgagagcgaggctgagcctacagatgaactctttctggcctgccttcgttaactgtgtatgtacatatatatattttttaatttgatgaaagctgattactgtcaataaacagcttcatgcctttgtaagttatttcttgtttgtttgtttgggtatcctgcccagtgttgtttgtaaataagagatttggagcactctgagtttaccatttgtaataaagtatataatttttttatgttttgtttctgaaaattccagaaaggatatttaagaaaatacaataaactattggaaagtactcccctaacctcttttctgcatcatctgtagatactagctatctaggtggagttgaaagagttaagaatgtcgattaaaatcactctcagtgcttcttactattaagcagtaaaaactgttctctattagactttagaaataaatgtacctgatgtacctgatgctatggtcaggttatactcctcctcccccagctatctatatggaattgcttaccaaaggatagtgcgatgtttcaggaggctggaggaaggggggttgcagtggagagggacagcccactgagaagtcaaacatttcaaagtttggattgtatcaagtggcatgtgctgtgaccatttataatgttagtagaaattttacaataggtgcttattctcaaagcaggaattggtggcagattttacaaaagatgtatccttccaatttggaatcttctctttgacaattcctagataaaaagatggcctttgcttatgaatatttataacagcattcttgtcacaataaatgtattcaaataccaataacagatcttgaattgcttccctttactacttttttcttcccaagttatatactgaagtttttatttttagttgctgaggttaacattgctgcaatctgaagtgatttgaaaattaagaagcaaagaatttaggaagagtcaaactagaagttgtgatctgaatgaaacagtctcccaatttcattaattctttccctcttnnnnnnnnnnnnnnnnnnnnnnnactacctcacccccaaataaacccctatgcctatggaaactaacagtttagcatttgggtctgtctgtagcttatttcttaatttgtttctaaaataatcaaccttgtttaaatatagaatcagtctcaaaagatagtaatctaatactatggaaaagattcacaagagaaaacatgaactagtactaactcaatgattacatgcgtaaatcaaacctcagctctggggaaatgggaaacttgaattctgcctacagatataacttaggagatcaacaaggcagtgcttaacaagggaacaattttttgcttggttgcttttcataccaagagccagtgtgattatcaggcagcaaaagcaatttgatatccaggaatatttcacaaaccactaattgagtcagggctgtttgctcattagcagtgttctagtacccagtaggtctgggagtgctaaatatcctcgcctgtggggtgtaaatccaaattacaccaaagagtttctcccttaggagtatatct

SEQ ID NO: 71 - DNA, 4243 bp, Homo sapiens
  misc_feature: Incyte ID No: 1453496.8
cctgccgggtagtttcgctttcctgcgcagagtctgcggaggggctcggctgcaccggggggatcgcgcctggcagaccccagaccgagcagaggcgacccagcgcgctcgggagaggctgcaccgccgcgcccccgcctagcccttccggatcctgcgcgcagaaaagtttcatttgctgtatgccatcctcgagagctgtctaggttaacgttcgcactctgtgtatataacctcgacagtcttggcacctaacgtgctgtgcgtagctgctcctttggttgaatccccaggcccttgttggggcacaaggtggcaggatgtctcagtggtacgaacttcagcagcttgactcaaaattcctggagcaggttcaccagctttatgatgacagttttcccatggaaatcagacagtacctggcacagtggttagaaaagcaagactgggagcacgctgccaatgatgtttcatttgccaccatccgttttcatgacctcctgtcacagctggatgatcaatatagtcgcttttctttggagaataacttcttgctacagcataacataaggaaaagcaagcgtaatcttcaggataattttcaggaagacccaatccagatgtctatgatcatttacagctgtctgaaggaagaaaggaaaattctggaaaacgcccagagatttaatcaggctcagtcggggaatattcagagcacagtgatgttagacaaacagaaagagcttgacagtaaagtcagaaatgtgaaggacaaggttatgtgtatagagcatgaaatcaagagcctggaagatttacaagatgaatatgacttcaaatgcaaaaccttgcagaacagagaacacgagaccaatggtgtggcaaagagtgatcagaaacaagaacagctgttactcaagaagatgtatttaatgcttgacaataagagaaaggaagtagttcacaaaataatagagttgctgaatgtcactgaacttacccagaatgccctgattaatgatgaactagtggagtggaagcggagacagcagagcgcctgtattggggggccgcccaatgcttgcttggatcagctgcagaactggttcactatagttgcggagagtctgcagcaagttcggcagcagcttaaaaagttggaggaattggaacagaaatacacctacgaacatgaccctatcacaaaaaacaaacaagtgttatgggaccgcaccttcagtcttttccagcagctcattcagagctcgtttgtggtggaaagacagccctgcatgccaacgcaccctcagaggccgctggtcttgaagacaggggtccagttcactgtgaagttgagactgttggtgaaattgcaagagctgaattataatttgaaagtcaaagtcttatttgataaagatgtgaatgagagaaatacagtaaaaggatttaggaagttcaacattttgggcacgcacacaaaagtgatgaacatggaggagtccaccaatggcagtctggcggctgaatttcggcacctgcaattgaaagaacagaaaaatgctggcaccagaacgaatgagggtcctctcatcgttactgaagagcttcactcccttagttttgaaacccaattgtgccagcctggtttggtaattgacctcgagacgacctctctgcccgttgtggtgatctccaacgtcagccagctcccgagcggttgggcctccatcctttggtacaacatgctggtggcggaacccaggaatctgtccttcttcctgactccaccatgtgcacgatgggctcagctttcagaagtgctgagttggcagttttcttctgtcaccaaaagaggtctcaatgtggaccagctgaacatgttgggagagaagcttcttggtcctaacgccagccccgatggtctcattccgtggacgaggttttgtaaggaaaatataaatgataaaaattttcccttctggctttggattgaaagcatcctagaactcattaaaaaacacctgctccctctctggaatgatgggtgcatcatgggcttcatcagcaaggagcgagagcgtgccctgttgaaggaccagcagccggggaccttcctgctgcggttcagtgagagctcccgggaaggggccatcacattcacatgggtggagcggtcccagaacggaggcgaacctgacttccatgcggttgaaccctacacgaagaaagaactttctgctgttactttccctgacatcattcgcaattacaaagtcatggctgctgagaatattcctgagaatcccctgaagtatctgtatccaaatattgacaaagaccatgcctttggaaagtattactccaggccaaaggaagcaccagagccaatggaacttgatggccctaaaggaactggatatatcaagactgagttgatttctgtgtctgaagttcacccttctagacttcagaccacagacaacctgctccccatgtctcctgaggagtttgacgaggtgtctcggatagtgggctctgtagaattcgacagtatgatgaacacagtatagagcatgaatttttttcatcttctctggcgacagttttccttctcatctgtgattccctcctgctactctgttccttcacatcctgtgtttctagggaaatgaaagaaaggccagcaaattcgctgcaacctgttgatagcaagtgaatttttctctaactcagaaacatcagttactctgaagggcatcatgcatcttactgaaggtaaaattgaaaggcattctctgaagagtgggtttcacaagtgaaaaacatccagatacacccaaagtatcaggacgagaatgagggtcctttgggaaaggagaagttaagcaacatctagcaaatgttatgcataaagtcagtgcccaactgttataggttgttggataaatcagtggttatttagggaactgcttgacgtaggaacggtaaatttctgtgggagaattcttacatgttttctttgctttaagtgtaactggcagttttccattggtttacctgtgaaatagttcaaagccaagtttatatacaattatatcagtcctctttcaaaggtagccatcatggatctggtagggggaaaatgtgtattttattacatctttcacattggctatttaaagacaaagacaaattctgtttcttgagaagagaatattagctttactgtttgttatggcttaatgacactagctaatatcaatagaaggatgtacatttccaaattcacaagttgtgtttgatatccaaagctgaatacattctgctttcatcttggtcacatacaattatttttacagttctcccaagggagttaggctattcacaaccactcattcaaaagttgaaattaaccatagatgtagataaactcagaaatttaattcatgtttcttaaatgggctactttgtcctttttgttattagggtggtatttagtctattagccacaaaattgggaaaggagtagaaaaagcagtaactgacaacttgaataatacaccagagataatatgagaatcagatcatttcaaaactcatttcctatgtaactgcattgagaactgcatatgtttcgctgatatatgtgtttttcacatttgcgaatggttccattctctctcctgtactttttccagacacttttttgagtggatgatgtttcgtgaagtatactgtatttttacctttttccttccttatcactgacacaaaaagtagattaagagatgggtttgacaaggttcttcccttttacatactgctgtctatgtggctgtatcttgtttttccactactgctaccacaactatattatcatgcaaatgctgtattcttctttggtggagataaagatttcttgagttttgttttaaaattaaagctaaagtatctgtattgcattaaatataatatgcacacagtgctttccgtggcactgcatacaatctgaggcctcctctctcagtttttatatagatggcgagaacctaagtttcagttgattttacaattgaaatgactaaaaaacaaagaagacaacattaaaacaatattgtttctaattgctgaggtttagctgtcagttctttttgccctttgggaattcggcatggtttcattttactgcactagccaagagactttacttttaagaagtattaaaattctaaaattctaa

SEQ ID NO: 72 - DNA, 4365 bp, Homo sapiens
  misc_feature: Incyte ID No: 1327351.406
  unsure 2173-2198: a, t, c, g, or other
cttcgctcgctccctccctccgtcttaggtcactgttttcaacctcgaataaaaactgcagccaacttccgaggcagcctcattgcccagcggaccccagcctctgccaggttcggtccgccatcctcgtcccgtcctccgccggcccctgccccgcgcccagggatcctccagctcctttcgcccgcgccctccgttcgctccggacaccatggacaagttttggtggcacgcagcctggggactctgcctcgtgccgctgagcctggcgcagatcgatttgaatataacctgccgctttgcaggtgtattccacgtggagaaaaatggtcgctacagcatctctcggacggaggccgctgacctctgcaaggctttcaatagcaccttgcccacaatggcccagatggagaaagctctgagcatcggatttgagacctgcaggtatgggttcatagaagggcatgtggtgattccccggatccaccccaactccatctgtgcagcaaacaacacaggggtgtacatcctcacatccaacacctcccagtatgacacatattgcttcaatgcttcagctccacctgaagaagattgtacatcagtcacagacctgcccaatgcctttgatggaccaattaccataactattgttaaccgtgatggcacccgctatgtccagaaaggagaatacagaacgaatcctgaagacatctaccccagcaaccctactgatgatgacgtgagcagcggctcctccagtgaaaggagcagcacttcaggaggttacatcttttacaccttttctactgtacaccccatcccagacgaagacagtccctggatcaccgacagcacagacagaatccctgctaccagagaccaagacacattccaccccagtggggggtcccataccactcatggatctgaatcagatggacactcacatgggagtcaagaaggtggagcaaacacaacctctggtcctataaggacaccccaaattccagaatggctgatcatcttggcatccctcttggccttggctttgattcttgcagtttgcattgcagtcaacagtcgaagaaggtgtgggcagaagaaaaagctagtgatcaacagtggcaatggagctgtggaggacagaaagccaagtggactcaacggagaggccagcaagtctcaggaaatggtgcatttggtgaacaaggagtcgtcagaaactccagaccagtttatgacagctgatgagacaaggaacctgcagaatgtggacatgaagattggggtgtaacacctacaccattatcttggaaagaaacaaccgttggaaacataaccattacagggagctgggacacttaacagatgcaatgtgctactgattgtttcattgcgaatcttttttagcataaaattttctactctttttgttttttgtgttttgttctttaaagtcaggtccaatttgtaaaaacagcattgctttctgaaattagggcccaattaataatcagcaagaatttgatcgttccagttcccacttggaggcctttcatccctcgggtgtgctatggatggcttctaacaaaaactacacatatgtattcctgatcgccaacctttcccccaccagctaaggacatttcccagggttaatagggcctggtccctgggaggaaatttgaatgggtccattttgcccttccatagcctaatccctgggcattgctttccactgaggttgggggttggggtgtactagttacacatcttcaacagaccccctctagaaatttttcagatgcttctgggagacacccaaagggtgaagctatttatctgtagtaaactatttatctgtgtttttgaaatattaaaccctggatcagtcctttgatcagtataattttttaaagttactttgtcagaggcacaaaagggtttaaactgattcataataaatatctgtacttcttcgatcttcaccttttgtgctgtgattcttcagtttctaaaccagcactgtctgggtccctacaatgtatcaggaagagctgagaatggtaaggagactcttctaagtcttcatctcagagaccctgagttcccactcagacccactcagccaaatctcatggaagaccaaggagggcagcactgtttttgnnnnnnnnnnnnnnnnnnnnnnnnnngacactgtccaaaggttttccatcctgtcctggaatcagagttggaagctgaggagcttcagcctcttttatggtttaatggccacctgttctctcctgtgaaaggctttgcaaagtcacattaagtttgcatgacctgttatccctggggccctatttcatagaggctggccctattagtgatttccaaaaacaatatggaagtgccttttgatgtcttacaataagagaagaagccaatggaaatgaaagagattggcaaaggggaaggatgatgccatgtagatcctgtttgacatttttatggctgtatttgtaaacttaaacacaccagtgtctgttcttgatgcagttgctatttaggatgagttaagtgcctggggagtccctcaaaaggttaaagggattcccatcattggaatcttatcaccagataggcaagtttatgaccaaacaagagagtactggctttatcctctaacctcatattttctcccacttggcaagtcctttgtggcatttattcatcagtcagggtgtccgattggtcctagaacttccaaaggctgcttgtcatagaagccattgcatctataaagcaacggctcctgttaaatggtatctcctttctgaggctcctactaaaagtcatttgttacctaaacttatgtgcttaacaggcaatgcttctcagaccacaaagcagaaagaagaagaaaagctcctgactaaatcagggctgggcttagacagagttgatctgtagaatatctttaaaggagagatgtcaactttctgcactattcccagcctctgctcctccctgtctaccctctcccctccctctctccctccacttcaccccacaatcttgaaaaacttcctttctcttctgtgaacatcattggccagatccattttcagtggtctggatttctttttattttcttttcaacttgaaagaaactggacattaggccactatgtgttgttactgccactagtgttcaagtgcctcttgttttcccagagatttcctgggtctgccagaggcccagacaggctcactcaagctctttaactgaaaagcaacaagccactccaggacaaggttcaaaatggttacaacagcctctacctgtcgccccagggagaaaggggtagtgatacaagtctcatagccagagatggttttccactccttctagatattcccaaaaagaggctgagacaggaggttattttcaattttattttggaattaaatacttttttccctttattactgttgtagtccctcacttggatatacctctgttttcacgatagaaataagggaggtctagagcttttattccttggccattgtcaacggagagctggccaagtcttcacaaacccttgcaacattgcctgaagtttatggaataagatgtattctcactcccttgatctcaagggcgtaactctggaagcacagcttgactacacgtcatttttaccaatgattttcaggtgacctgggctaagtcatttaaactgggtctttataaaagtaaaaggccaacatttaattattttgcaaagcaacctaagagctaaagatgtaatttttcttgcaattgtaaatcttttgtgtctcctgaagacttcccttaaaattagctctgagtgaaaaatcaaaagagacaaaagacatcttcgaatccatatttcaagcctggtagaattggcttttctagcagaacctttccaaaagttttatattgagattcataacaacaccaagaattgattttgtagccaacattcattcaatactgttatatcagaggagtaggagagaggaaacatttgacttatctggaaaagcaaaatgtacttaagaataagaataacatggtccattcacctttatgttatagatatgtctttgtgtaaatcatttgttttgagttttcaaagaatagcccattgttcattcttgtgctgtacaatgaccactgttattgttactttgacttttcagagcacacccttcctctggtttttgtatatttattgatggatcaataataatgaggaaagcatgatatgtatattgctgagttgaaagcacttattggaaaatattaaaaggctaacattaaaagactaaaggaaacag

SEQ ID NO: 73 - DNA, 2350 bp, Homo sapiens
  misc_feature: Incyte ID No: 200578.1
gccagaggggaaaaaaagagtaatgcacaggtatctcttttgcagtggtgactgtattttgagtaccttgtgtgacagggtattattacagcatcttgtgggaaaacctattaggcctttgcatgtttaagctgtataatttgttgggttgtgagtggtctgacttaaatgtgtattataaaatttagacatcaaattttcctactaactaactttattagatgcatacttggaagcacagtcatatcacactgggaggcaatgcaatgtggttacctggtcctaggtttgaactgtcttatttcaaaagatttctgaattaatttttccctagaatttctccttcattccaaagtacaaacatactttgaagaatgaaacagattgttcccatgaatgtatgctcatactcgactagaaacgatctatgttaaatgactgtgtatatgaattatttcaagtactaccccaaataactttcttattgctctgaaagaagaaaagcaatgtaaatcactatgattattgcacaaacaaccagaattctccaacaattttaagtaatctgatcctcttcttggagaaaattgttacctaatagtttttccttatgaatgttattactactggtataaatcaaatttctataaatttcctacttaagtcttaagaactgggttcttcctttgatgttattcatgttcagaaaggaaacaacactttactcttttaggacaattcctagaatctatagtagtatcaggatatattttgctttaaaatatattttggttattttgaatacagacattggctccaaattttcatctttgcacaatagtatgacttttcactagaacttctcaacatttgggaactttgcaaatatgagcatcatatgtgttaaggctgtatcatttaatgctatgagatacattgttttctccctatgccaaacaggtgaacaaacgtagttgttttttactgatactaaatgttggctacctgtgattttatagtatgcacatgtcagaaaaaggcaagacaaatggcctcttgtactgaatacttcggcaaacttattgggtcttcattttctgacagacaggatttgactcaatatttgtagagcttgcgtagaatggattacatggtagtgatgcactggtagaaatggtttttagttattgactcagaattcatctcaggatgaatcttttatgtctttttattgtaagcatatctgaatttactttataaagatggttttagaaagctttgtctaaaaatttggcctaggaatggtaacttcattttcagttgccaaggggtagaaaaataatatgtgtgttgttatgtttatgttaacatattattaggtactatctatgaatgtatttaaatatttttcatattctgtgacaagcatttataatttgcaacaagtggagtccatttagcccagtgggaaagtcttggaactcaggttacccttgaaggatatgctggcagccatctctttgatctgtgcttaaactgtaatttatagaccagctaaatccctaacttggatctggaatgcattagttatgaccttgtaccattcccagaatttcaggggcatcgtgggtttggtctagtgattgaaaacacaagaacagagagatccagctgaaaaagagtgatcctcaatatcctaactaactggtcctcaactcaagcagagtttcttcactctggcactgtgatcatgaaacttagtagaggggattgtgtgtattttatacaaatttaatacaatgtcttacattgataaaattcttaaagagcaaaactgcattttatttctgcatccacattccaatcatattagaactaagatatttatctatgaagatataaatggtgcagagagactttcatctgtggattgcgttgtttcttagggttcctagcactgatgcctgcacaagcatgtgatatgtgaaataaaatggattcttctatagctaaatgagttccctctggggagagttctggtactgcaatcacaatgccagatggtgtttatgggctatttgtgtaagtaagtggtaagatgctatgaagtaagtgtgtttgttttcatcttatggaaactcttgatgcatgtgcttttgtatggaataaattttggtgcaatatgatgtcattcaactttgcattgaattgaattttggttgtatttatatgtattatacctgtcacgcttctagttgcttcaaccattttataaccatttttgtacatattttacttgaaaatattttaaatggaaatttaaataaacatttgatagtttacataataa

SEQ ID NO: 74 - DNA, 2722 bp, Homo sapiens
  misc_feature: Incyte ID No: 2835028CB1
catacacactggctcacacatctactctctctctctatctctctcagaatgacaattctaggtacaacttttggcatggttttttctttacttcaagtcgtttctggagaaagtggctatgctcaaaatggagacttggaagatgcagaactggatgactactcattctcatgctatagccagttggaagtgaatggatcgcagcactcactgacctgtgcttttgaggacccagatgtcaacaccaccaatctggaatttgaaatatgtggggccctcgtggaggtaaagtgcctgaatttcaggaaactacaagagatatatttcatcgagacaaagaaattcttactgattggaaagagcaatatatgtgtgaaggttggagaaaagagtctaacctgcaaaaaaatagacctaaccactatagttaaacctgaggctccttttgacctgagtgtcatctatcgggaaggagccaatgactttgtggtgacatttaatacatcacacttgcaaaagaagtatgtaaaagttttaatgcatgatgtagcttaccgccaggaaaaggatgaaaacaaatggacgcatgtgaatttatccagcacaaagctgacactcctgcagagaaagctccaaccggcagcaatgtatgagattaaagttcgatccatccctgatcactattttaaaggcttctggagtgaatggagtccaagttattacttcagaactccagagatcaataatagctcaggggagatggatcctatcttactaaccatcagcattttgagttttttctctgtcgctctgttggtcatcttggcctgtgtgttatggaaaaaaaggattaagcctatcgtatggcccagtctccccgatcataagaagactctggaacatctttgtaagaaaccaagaaaaaatttaaatgtgagtttcaatcctgaaagtttcctggactgccagattcatagggtggatgacattcaagctagagatgaagtggaaggttttctgcaagatacgtttcctcagcaactagaagaatctgagaagcagaggcttggaggggatgtgcagagccccaactgcccatctgaggatgtagtcatcactccagaaagctttggaagagattcatccctcacatgcctggctgggaatgtcagtgcatgtgacgcccctattctctcctcttccaggtccctagactgcagggagagtggcaagaatgggcctcatgtgtaccaggacctcctgcttagccttgggactacaaacagcacgctgccccctccattttctctccaatctggaatcctgacattgaacccagttgctcagggtcagcccattcttacttccctgggatcaaatcaagaagaagcatatgtcaccatgtccagcttctaccaaaaccagtgaagtgtaagaaacccagactgaacttaccgtgagcgacaaagatgatttaaaagggaagtctagagttcctagtctccctcacagcacagagaagacaaaattagcaaaaccccactacacagtctgcaagattctgaaacattgctttgaccactcttcctgagttcagtggcactcaacatgagtcaagagcatcctgcttctaccatgtggatttggtcacaaggtttaaggtgacccaatgattcagctatttaaaaaaaaaagaggaaagaatgaaagagtaaaggaaatgattgaggagtgaggaaggcaggaagagagcatgagaggaaagacagacaggaaaataaaaaatgatagttgccattattaggatttaatatatatccagtgctttgcaagtgctctgcgcaccttgtctcactccatcctgacaataatcctgggaggtgtgtgcaattactacgactactctcttttttatagatcattaaattcagaactaaggagttaagtaacttgtccaagttgttcacacagtgaagggaggggccaagatatgatggctgggagtctaattgcagttccctgagccatgtgcctttctcttcactgaggactgccccattcttgagtgccaaacgtcactagtaacagggtgtgcctagataatttatgatccaaactgagtcagtttggaaagtgaaagggaaacttacatataatccctccgggacaatgagcaaaaactaggactgtccccagacaaatgtgaacatacatatcatcacttaaattaaaatggctatgagaaagaaagagggggagaaacagtcttgcgggtgtgaagtcccatgaccagccatgtcaaaagaaggtaaagaagtcaagaaaaagccatgaagcccatttgatttcatttttctgaaaataggctcaagagggaataaattagaaactcacaatttctcttgtttgttaccaagacagtgattctcttgctgctaccacccaactgcatccgtccatgatctcagaggaaactgtcgctgaccctggacatgggtacgtttgacgagtgagaggaggcatgacccctcccatgtgtatagacactaccccaacctaaattcatccctaaattgtcccaagttctccagcaatagaggctgccacaaacttcagggagaaagagttacaagtacatgcaatgagtgaactgactgtggctacattcttgaagatatacgggagagacgtattattaatgcttggcatatatcatcttgcc

SEQ ID NO: 75 - DNA, 1611 bp, Homo sapiens
  misc_feature: Incyte ID No: 2875023CB1
attcggaattcttgagaggttcttggagagattctgggagccaaacactccattgggatcctagctgttttagagaacaacttgtaatggagccttcatctcttgagctgccggctgacacagtgcagcgcattgcggctgaactcaaatgccacccaacggatgagagggtggctctccacctagatgaggaagataagctgaggcacttcagggagtgcttttatattcccaaaatacaggatctgcctccagttgatttatcattagtgaataaagatgaaaatgccatctatttcttgggaaattctcttggccttcaaccaaaaatggttaaaacatatcttgaagaagaactagataagtgggccaaaatagcagcctatggtcatgaagtggggaagcgtccttggattacaggagatgagagtattgtaggccttatgaaggacattgtaggagccaatgagaaagaaatagccctaatgaatgctttgactgtaaatttacatcttctaatgttatcattttttaagcctacgccaaaacgatataaaattcttctagaagccaaagccttcccttctgatcattatgctattgagtcacaactacaacttcacggacttaacattgaagaaagtatgcggatgataaagccaagagagggggaagaaaccttaagaatagaggatatccttgaagtaattgagaaggaaggagactcaattgcagtgatcctgttcagtggggtgcatttttacactggacagcactttaatattcctgccatcacaaaagctggacaagcgaagggttgttatgttggctttgatctagcacatgcagttggaaatgttgaactctacttacatgactggggagttgattttgcctgctggtgttcctacaagtatttaaatgcaggagcaggaggaattgctggtgccttcattcatgaaaagcatgcccatacgattaaacctgcattagtgggatggtttggccatgaactcagcaccagatttaagatggataacaaactgcagttaatccctggggtctgtggattccgaatttcaaatcctcccattttgttggtctgttccttgcatgctagtttagagatctttaagcaagcgacaatgaaggcattgcggaaaaaatctgttttgctaactggctatctggaatacctgatcaagcataactatggcaaagataaagcagcaaccaagaaaccagttgtgaacataattactccgtctcatgtagaggagcgggggtgccagctaacaataacattttctgttccaaacaaagatgttttccaagaactagaaaaaagaggagtggtttgtgacaagcggaatccaaatggcattcgagtggctccagttcctctctataattctttccatgatgtttataaatttaccaatctgctcacttctatacttgactctgcagaaacaaaaaattagcagtgttttctagaacaacttaagcaaattatactgaaagctgctgtggttatttcagtattattcgatttttaattattgaaagtatgtcaccattgaccacatgtaactaacaataaataatata

SEQ ID NO: 76 - DNA, 2354 bp, Homo sapiens
  misc_feature: Incyte ID No: 3173735CB1
ttctaaatatttcatcaatgaggaaatcccagccctacaacttcggaacagtgaaatattagtccagggatccagtgagagacacagaagtgctagaagccagtgctcgtgaactaaggagaaaaagaacagacaagggaacagcctggacatggcatcagagatccacatgacaggcccaatgtgcctcattgagaacactaatgggcgactgatggcgaatccagaagctctgaagatcctttctgccattacacagcctatggtggtggtggcaattgtgggcctctaccgcacaggcaaatcctacctgatgaacaagctggctggaaagaaaaagggcttctctctgggctccacggtgcagtctcacactaaaggaatctggatgtggtgtgtgccccaccccaagaagccaggccacatcctagttctgctggacaccgagggtctgggagatgtagagaagggtgacaaccagaatgactcctggatcttcgccctggccgtcctcctgagcagcaccttcgtgtacaatagcataggaaccatcaaccagcaggctatggaccaactgtactatgtgacagagctgacacatagaatccgatcaaaatcctcacctgatgagaatgagaatgaggttgaggattcagctgactttgtgagcttcttcccagactttgtgtggacactgagagatttctccctggacttggaagcagatggacaacccctcacaccagatgagtacctgacatactccctgaagctgaagaaaggtaccagtcaaaaagatgaaacttttaacctgcccagactctgtatccggaaattcttcccaaagaaaaaatgctttgtctttgatcggcccgttcaccgcaggaagcttgcccagctcgagaaactacaagatgaagagctggaccccgaatttgtgcaacaagtagcagacttctgttcctacatctttagtaattccaaaactaaaactctttcaggaggcatccaggtcaacgggcctcgtctagagagcctggtgctgacctacgtcaatgccatcagcagtggggatctgccgtgcatggagaacgcagtcctggccttggcccagatagagaactcagctgcagtgcaaaaggctattgcccactatgaacagcagatgggccagaaggtgcagctgcccacagaaaccctccaggagctgctggacctgcacagggacagtgagagagaggccattgaagtcttcatcaggagttccttcaaagatgtggaccatctatttcaaaaggagttagcggcccagctagaaaaaaagcgggatgacttttgtaaacagaatcaggaagcatcatcagatcgttgctcagctttacttcaggtcattttcagtcctctagaagaagaagtgaaggcgggaatttattcgaaaccagggggctatcgtctctttgttcagaagctacaagacctgaagaaaaagtactatgaggaaccgaggaaggggatacaggctgaagagattctgcagacatacttgaaatccaaggagtctatgactgatgcaattctccagacagaccagactctcacagaaaaagaaaaggagattgaagtggaacgtgtgaaagctgagtctgcacaggcttcagcaaaaatgttgcaggaaatgcaaagaaagaatgagcagatgatggaacagaaggagaggagttatcaggaacacttgaaacaactgactgagaagatggagaacgacagggtccagttgctgaaagagcaagagaggaccctcgctcttaaacttcaggaacaggagcaactactaaaagagggatttcaaaaagaaagcagaataatgaaaaatgagatacaggatctccagacgaaaatgagacgacgaaaggcatgtaccataagctaaagaccagagccttcctgtcacccctaaccaaggcataattgaaacaattttagaatttggaacaagcgtcactacatttgataataattagatcttgcatcataacaccaaaagtttataaaggcatgtggtacaatgatcaaaatcatgttttttcttaaaaaaaaaaaaaagactgtaaattgtgcaacaaagatgcatttacctctgtatcaactcaggaaatctcataagctggtaccactcaggagaagtttattcttccagatgaccagcagtagacaaatggatactgagcagagtcttaggtaaaagtcttgggaaatatttgggcattggtctggccaagtctacaatgtcccaatatcaagggacaccaccctagctttcttagtgagacaatgtcagttatccatagatcagg

SEQ ID NO: 77 - DNA, 11099 bp, Homo sapiens
  misc_feature: Incyte ID No: 474301.10
  unsure 7630-7655: a, t, c, g, or other
ttactactactaaatttgcggccgcgtcgacagaaatacctctttcagctgaagtaacaacggaggaaagtttttatttgagcatccagaaagatctcaccgcgctgttaactggagacactcaggcagagatttcccagataatgaattatgggaggaaaggggctgtctgtgtgcaggagccatcttggtctttgggcctccctcgggagctcagcagtgacctgccactctgcaggcagtgttggtttcttgaaagagcagaggtctgctcttgggagagagcacccagggggatgtgatcgaagcagctccatgggacgcccaggccgggtcaaacatgtggaatttcaaggagtggaaatactgtggacaggaggagacaagagagagacccagcatcctatagattttgagacatcactgcaaagaacagcctctcctgacagcaaagagtcttccaaagtgccacgccatctcatctcatcagctggtttgtgtaattcaagtagtttaactgagaatgtttgggatgaatcctggaaagctccttcagagaggcctggcactagctcggggacattttcccctgtgcgtcttgatgagagtggagaggatgaagtcttcctacaggaaaacaaacagcatcttgagaagacacctaaaccagagagagacagggaaaggatcagcgaacaagaggagcacgttaagggggaagatgaagacatccttgggcctggatatacggaggactccaccgacgtgtacagctcccagtttgaaaccattttggacaacacttctttatactacagtgcagagtccctggagacattatactcagagcctgatagctattttagctttgaaatgcccctcactccaatgatacaacagcgcattaaagaaggtggtcagttcttggagaggacatcagggggaggacatcaggatatcctgagtgtgtctgcagatggtggcatcgtgatgggctattctagtggcgtcaccaatgggctgaatgatgccagcgactccatctacacgaaaggcaccccggagattgctttctggggaagcaatgctggggtgaaaacaacacggctagaagctcattctgaaatggggagcactgaaattttggaaaaggagaccccagaaaatctcagtaatggtaccagcagcaatgtggaagcagccaaaaggttggccaaacgcctttatcagctggacagattcaaaagatcagatgttgcaaaacaccttggcaagaacaacgaatttagcaaactagttgcagaagaatatctgaagttttttgattttacaggaatgacgctggatcagtcactcaggtatttctttaaagcattctctcttgtgggagaaactcaagaacgagagagagttttaatacacttctccaatagatatttttattgtaacccagataccattgcttcacaagatggagtccattgccttacctgtgcaataatgcttcttaataccgatctacatggccacgtgaatattggaaagaagatgacctgtcaggagttcattgcaaatctgcaaggggtaaatgagggtgttgatttctccaaggatctgctgaaagctctgtacaactcaatcaagaatgagaagcttgaatgggcagtagatgatgaagagaaaaaaaagtctccctcagaaagtactgaggagaaagctaacggaacacatccaaagaccatcagtcgtattggaagtactactaacccatttttggacattcctcatgatccaaatgctgctgtgtacaaaagtggattcttggctcggaaaattcatgcagatatggatggaaagaagactccaagaggaaaacgaggatggaaaaccttttatgctgtactgaagggaacagttctttacttgcaaaaggatgaatacaagccagaaaaggccttgtctgaagaggacttgaaaaacgctgtgagtgtgcaccacgcattggcatccaaggccacggactatgagaagaaaccaaacgtgtttaaacttaaaactgccgactggagggtcttgctttttcaaactcagagcccagaggaaatgcaagggtggataaacaaaatcaattgtgtggcagctgtattttctgcaccaccatttccagcagcaatcggctctcagaagaagtttagccgcccacttctgcctgccactacaacaaaactgtctcaggaggagcaactgaagtcacatgaaagtaagctgaagcagatcaccaccgagctggccgagcaccgctcatatccccccgacaagaaggtcaaagccaaggacgtcgatgagtacaaactgaaagaccactatctggagtttgagaaaacccgctatgaaatgtatgtcagcattctcaaggaaggaggcaaagagctactgagtaacgatgaaagcgaggctgcaggactgaagaagtcgcactcgagtccttcgctgaacccggatacttctccaatcactgccaaagtcaagcgtaacgtgtcagagaggaaggatcaccgacctgaaacaccaagcattaagcaaaaagttacttagagtccatctgcggccaggaagtgctggtcatggagcaaaatagggtttttcaagatctttctggtaatccgtgaaaatatttaaaaaaaaaaaagtctgtgacaaaacggtgcattagtaattttttctattgtatatttttgttagtttctgtacagattgtctttgctcttgatttcttttgctttgatgatttttgcaacttgatagctaatgcaccttttctgtgaggaggaggggatcgtgatttcagaatgaattatgtatcccttctcttttggttttctcttgtttgcagtctgctcagttgttttatgtattctcatatcaactgttaaacttttttttaaggttaaagaattaatccattgtgaaacacttaactggacaaactgtagttttagtaaattctagctggagttaatatacgcctttatatgtgaaatcttgcccagtcacagaggtagaattgagcactcacagatgctccagtaagaatcacagtgctgggaatctagttgctccaatatgaggcagcttcatgtgcagcttagcacttgttgttgagatcggaccctgctggaagcagggaaaagaagcgtgaagatcgtaggattgagaacttagggaagcacattagcttgcttgaagtgctgattccatttcagccaagcaagggaaagaggaagtggagtcattttgcctttgaaggctgaggaaagattgatacccagttaattttgtttgctaaaggatgggggcaataatcggcccttgaggagctgcagcagtaggcatgtgctcagtctgcaggaattgttacctcactcccacagggtctagactagaaatccatcatctctatcgttgatatccttccatccaggaatagatttttcttactctacatatgtgtgtgtgcgtgagtgtgtgtgcgtgtgtgggaatggggttgtgtcctggttgtgatattgaggtcttccttcctaacaaattaatactaaaatgaaacagcttttcttgtgtccttaagacaaaataaggaaggaaaacgtagctgcagttgtccacgatggatattggttctttaaaatatatctgaaagtagtagtcagaatgaattatggttggaaaactgaggaatcttctggttgcaggtgcaaagtgactttgtttattcttgtctcagtctccttgatagccacttcactctgctactactcaactttctcctaaaaatacttcatctattttcagtcctttctttctgtctactcaaaatggttctattaactttgcagtcatgagcttgttccagttacagtccctttgaagttcagggtgataaacagaatattcttctgtagaggaagagaaaggagtgaaagtttagcccactgagacctagagctttgtgatttcctaaccttgaaactctgtaatccctaaagttaaaatctccgcaagtggcacaacttcagaactaatagtatcactttgatttttctttttcctcccttagaaagtttctctagttctatagtttatttgttgaaggtactatgaccaaagaatcagctgctctacaggaatagcatggttccagtgaattagagaaaacctgctgtaaagccatggtagtgtctaagtggtatgttattatgatgtactagcatttatttacagaattatttattaacgtttacttccttcccctctgtaaatgtccatgactattgcccagagaaggcttacccctctctagggttgcagttgctttctttgtaataagtattttgccacacctgtaaaaaaaaaaaacctcacttttaactctctgccttgttggggtaaaggcagtaactaagtttatgtttcagaactgcaaaacaaacaggatagttaccaatatggcccatgtgtcagattgatttttgtagcctctcactgaatccaacatatccacaagcaagttatctgtctttctacctgataatctaaattatcaggatatttgttttctgcctaaatgtttatactaagccgaggggagagaggtacctagaccatgtcatctacgagcttcagtaactaaagaaaaaggaacttccctgagtggcttgaatgtgtttgcccacagtctatatctatgtatatagaatgtctgtatgtattttacttatttaatatacattgaatggtaccttgctacagtatttctgacatttagagtagtgttgaaatactcggctagcatcagcaccactatagcactgtccgtgtcatatgagtcactaatattaactccagggacttctggataggctaatagatcattggatacgaagggctcttttgaagcttcagtataccatgtttgcatagtttatctttaaaaacaactttaaaggttcttttgtgagccaggatctcagactgccgtagcatgatgctgtccatctttagcgcatgggctgagaacacctcttccctgaggcttctgaaggttgctgtctgtcatgagtgcatgaaggaggccaagagtttatgctatgggaggaaccagtcactgatttgcctagattctgagagtctggcccatagccaaccacattttcctttgggataatttatttcctgtggcatctagccacgaagaaattgaggatgtttcctttcacagctgctccaagcctgttgcccaattcacggtacaagggagcaccccttccctttcctctgaaggtacgccacccacctccgtcgcccacctcagcgcccaggagccttgggacttccttccatatgataaatcattcttcttcacgtcaatacacttcatattaatttctagtacagaaaatcttgacagctatcagaatgccttggtcatagtgttgttgcaaaattgaccatacaggtggcccatgtataaaatctgaattttaggggtttgtccccacctcgcatgctggcttttacagggaggtgtctgggattcctcattagcaatcaaaacttaattactgggatgcagagtccttactttatcgccagcccgtaggcatttctgaagtgcacttttttgaaacatcattttgctaactctcagcagtgtctaattaaactgagcaatacttttgtgaattttaattaatctcagcaaaaccatgatgggagagagtcctctgatggaaatgtagtccctggattatgtgtaacctttttattgctcttagatgcagaggatagaaagcattttttggtgcagtggtcttgtggcaaacacaagaccctctatgcgtctccaactgttatcctaatctagaaaatgaggactggcccctgggcaaaagtgacatgaggaatttactctggaagaggaaaatctgggtggctttccaaggctaagataggtttgtatttcaccctgtggccaagctacagaacttctgagattgtggaagaatttttgcaaccagcagggaaagaggcctcttactgcctaaacacaaagttacactgagcttttctactgtcctttgcctattgctccctctatcatgtaaagatctgggaaggatgagaggcagggcctgcttgtcatgagctgcactcttttctttttaactaatcattgacaattggaagaaaattgacgttaaagaagtttctccattgtcttactaacaaaaccttttgggtttcattaattgtccttgaaattgagttcctttggcatttttccttgcagtcatcagttaagcatgttgcatcctgaattcacagaagtttagctttgcaggtttgaatctctgtaatttaactcccgtggacttggtcgagttttcagcaggttgggagccacctctcttcatttcagcagtgagtcatcccttgacttttcaaatgacagaattttttccaattgtaaaattagcactgtaaaacaaagaaccaaagtggcatcctaagagttgttaaacctgaagtctagtttatgaggaattgtccaagttggagtttaaatagtatctgcttttgtctcaaagcatctaagttattctgacagaaaatggtaagtcagctttgcaggcagatgcgcctctgggcctcctaccttgctccacagctttctggccatcttgtctcccaggccatgccactgctctgccacatgtcagcaaatttctttccaccagtcttatagcatcttacatgatcaaatcatcacagaataaccccgtgatagattattgatagcaatagagaggggcggctttgtcactgatttttctctcagattccttttccatctctcatccataaaggaaggactgaaatccaaaggcattctccttttgtacctacagtatccagaacccacgtgggcagccttctgcttatgacaataattggcccattgcatgcagagagaatgtcttcatagagagaatgtcattaaatacttgaatctgcatgacagtttgacttgaatgcaacagcaggaaaattttgcaagttacataattgtatatacagtaggttttcttaagtctcttcggttcatcctttgtaatttgtgtgtgtatctgtagtattgcaggcttttggagactattcttacaggcagtatgtcagtcatcaaagaaaatgctgtcacctgccattgttgtatttgtgggtatttatagttgtatgtatgtaaatgcatcagtgtgtagattgcatatcagtgtatggtacatgtacatcaaaattatttttgtccttaatcagtgtgatatgaaaagcaagtacaacctcataggactgattatataatgaagttgttgagagtatatatagtggtattgttttattaaacttaaactcaaataatattttgattaaaatttttaataagactttatgctagaaaattctttgagctttgaatcaccagggcaaaaatgactttcaactaaccttgtgaatcttttgcagtgtactgtgtgcaataccaagggcatagctccctgtaatttgggaaatnnnnnnnnnnnnnnnnnnnnnnnnnngggcagcctgtgcagtcttcgtaactttagtattaagagcacttaaagtcaaactgacaattttgggcttattacaaaatgtgatgctttaaagcacacgttctttattgttgttgtaattagtccataaaaaatatagctttcggaagaattaaatacccaccatatcatttatgtatttgtgtatgttttacgggagatcaaaccactctcgtggtgccgcatccgtactcgcttgacttggaagaaatatcacaagcactaaagtatatcagggcatcccaggattgggtactgtatcctaggtttgcagttgcagaaattagcatctagtgtcacaggtaaaagaatttcaggaccaggtttaaactttattttaaatatttttatacttaggtctctttttcctgcctctccccaaagaagagccactggccttagttgtttgagcttactgcttatattatagagtgtaaataggtaactagagactaaaattttattaaccagcatgtttggtatatttaaagcagtgactgagtgtgtttgagtgagtggctgagtgcagtgtcttttgtttaaacacactgcctcgtgtctttgtagctgattcagagagtttgaattgtggggtgggagactaacttcagctccaggctgcagtaatgtgttggtagttacacttgaggcatttttttgttgttgttaattaactctatagtctcaaactatttttgcaaatatatcatttttcctaattggttcttgacgtgcagtggactggctctgtgaatgattggcagggtcttagttttgcgagagcatttccttctaagaattattgtgatctgcagaaacagccatttgattcaaaaatcatgtagaaaaggagtaggagaagcaaaacgtttcatttttgggccttaaccatttgaaatgtttggactttaaacataaagccatggagtttataaagccaagtaaccatttgatatggataataatatctactctagagagagtatatatatgcacattgatttttaatgctgttaagatacttttgtaaaactgtaggaacaagagtaattagaccaaattgaagcttaggggacagtaaagtggttgctttccatttagggtaaccatgcatgtggttagtcctctcctcctgagattcagaaccagttgactgtccccttaggtgtataaggagaaaagttgacatgtctgggacctctgacatgtgtacacatgcttgcacacatgcacacacagtgaatgttttaagttatacaaacataagaccttaagatgcaaagagccagaatattctaaagaggtgatgaacagagggggtggaaactgcatcacagatgttttccaagggccagggtggaatctgagctctagtgtctgactttgagatgcattatatttttaacacataaatgaggggatccatatcacattctttcttgtggaccaccaaattgaaggctttcttgtaattcacaagcagcagctctccagcatctctccgtagcctgggtgaagtcccagaagctggtgtgcatcattttccaaggtggcagagctgcttgctctgcagatcattcctttgagagaggagtacaagtgaagaaacaaggaggcacttcctgtaggagcactgatgtgccttgtccacactcccctctgagctttactggtaagagagctccgactgaacatgctgagcagttgagcacttttccatcagcaacaacagcgaggatggaaatggaaaggaaccgaactaaaatgcatttccctttgcagggcagagagctaagctcttaggaatagtgttatagaaataagcaccctaacttcaattcctgaaaatgttggttaatggagagaattttggagtttcacttaatattttcccatcggtcgccataaataagtcttcaggcgctcctagaagagtcccagcccaaggctcgattaaggaccacactgcaggtctgaggctcactgctctgagtcctgaacaccagagccctgcagagagtggtgataacacatcatctctgcaaagaggaacctctcccccggccgccacttcactcaggcttctactgagcagcaaggacagcctgggtttcaaatgccacttcccctgctttagggatccaggtgtcctgatagcgtgaccctgctgaggcaaggtatcaactccgagagtgactgagtcactgagcgtggcacatgaacaaacgtcatgacaaagattctctgagtgaagttaacaccacgtattttacctttgcaaaaaacaaactggcaccctgagttctaactacggacggacgatatctttgcctccacacccagattcctggaaatggctaacgtttcctttctaggggaagggtcgaggaatactcaagtgctagcttagcagctttgttcagtccagatcagagctgttaggtaaaggcctaaccacctccctgcagtctcttatatctcaagctttaggaacccatttctaaatgtacactagcggagaatttatattgtcagccttgattaccataggacaggcagaaaggcgataatttgtatcttttaatataaaagaagcttttaacttttccagcctattataataactgagttatattcactgtggctcaaactaattggcattgtggaacatttctttaccttcaaagttttctccaccaatcatttcagttctattgcagtcctggtgccatatgtcccctgcaaattgtgaaagtaattagtgacaaaatagcagcctgctccttttcaatggcgaaactgtcggcattagcagttttgggtaagctggcggtactataacacgtactggaaacctgttcctcatcaccacctaccagattctggaaatgccgtcttctagaaaacgatggcgtttgtggtggtcttcttttgaaaggaacagtaatttgtgtggatattgttaaagtgtttaaagaatattttgacaattaagtttacattttacaattgctttattttttattaaaatagttgtatataaatattaccctatttcactgttgttcaagtaaatctaaaccttgtagacaagtgagtcatctgatatgtatagaagctgtgatatatagagtacatttattgtgtaaatgtttatgaatataattgttcctgtgtttttataagttggggatattttgttgttttacggcaacaaaatttattgcatttaaatggtttttatgtaatagaaatcacgcaaaatagtgaaggatttaaaatatgtatatgatacatgtaaatgtacaaactttagaaagaaataaatccacaatttcatcaaaaaaatctatgtcggtgcggagaaagaggtaatgaaatggcaggattcgatatcagcttatc

SEQ ID NO: 78 - DNA, 2041 bp, Homo sapiens
  misc_feature: Incyte ID No: 406992.1
  unsure 1923, 1998, 2026: a, t, c, g, or other
gtggtggaacgaggaggtggagaattgagagcacgatgcatacacaggtgtttctgagtagtaattagatcgctgtgaaggaaaaagcacacctttgagttttcacctgtgaacactatagcgctgagagagacagtctgaaagcagaggaagacatcgatcagtaacaccaagagacaccaaagttgaaagttttgttttctttccctctgttttatttttcccccgtgtgtccctactatggtcagaaagcctgttgtgtccaccatctccaaaggaggttacctgcagggaaatgttaaacgggaggctgccttccctgggcaacaaggagccacctgggcaggagaaagtgcagctgaagaggaaagtcactttactgaggggagtctccattatcattggcaccatcattggagcaggaatcttcatctctcctaagggcgtgctccagaacacgggcagcgtgggcatgtctctgaccatctggacggtgtgtggggtcctgtcactatttggagctttgtcttatgctgaattgggaacaactataaagaaatctggaggtcattacacatatattttggaagtctttggtccattaccagcttttgtacgagtctgggtggaactcctcataatacgccctgcagctactgctgtgatatccctggcatttggacgctacattctggaaccattttttattcaatgtgaaatccctgaacttgcgatcaagctcattacagctgtgggcataactgtagtgatggtcctaaatagcatgagtgtcagctggagcgcccggatccagattttcttaaccttttgcaagctcacagcaattctgataattatagtccctggagttatgcagctaattaaaggtcaaacgcagaactttaaagacgccttttcaggaagagattcaagtattacgcggttgccactggctttttattatggaatgtatgcatatgctggctggttttacctcaactttgttactgaagaagtagaaaaccctgaaaaaaccattccccttgcaatatgtatatccatggccattgtcaccattggctatgtgctgacaaatgtggcctactttacgaccattaatgctgaggagctgctgctttcaaatgcagtggcagtgaccttttctgagcggctactgggaaatttctcattagcagttccgatctttgttgccctctcctgctttggctccatgaacggtggtgtgtttgctgtctccaggttattctatgttgcgtctcgagagggtcaccttccagaaatcctctccatgattcatgtccgcaagcacactcctctaccagctgttattgttttgcaccctttgacaatgataatgctcttctctggagacctcgacagtcttttgaatttcctcagttttgccaggtggctttttattgggctggcagttgctgggctgatttatcttcgatacaaatgcccagatatgcatcgtcctttcaaggtgccactgttcatcccagctttgttttccttcacatgcctcttcatggttgccctttccctctattcggacccatttagtacagggattggcttcgtcatcactctgactggagtccctgcgtattatctctttattatatgggacaagaaacccaggtggtttagaataatgtcagagaaaataaccagaacattacaaataatactggaagttgtaccagaagaagataagttatgaactaatggacttgagatcttggcaatctgcccaaggggagacacaaaatagggatttttacttcattttctgaaagtctagagaattacaactttggtgataaacaaaaggagtcagttatttttattcatatattttagcatattcgaactaatttctaagaaatttagttatanctctatgtagttatagaaagtgaatatgcagttattctatgagtcgcacaattcttgagtctctgatacctaccnattggggttaggagaaaagactagacanttactatgtggtcat

SEQ ID NO: 79 - DNA, 2428 bp, Homo sapiens
  misc_feature: Incyte ID No: 234681.21
atccaactcacaaattcttcctatttctaggggtgtaatagtcatcaaaagcaccttttaaaaaactttttattggagtaggaatgcatttcgaaaaatgtgcctaagtatactgatggattgaattttttccaccaaaacttgaacatagcctgtacccagcactaagaaaagaaatggcaactattgtaacatcccaaaagctccccttgtgccttttccggtcattgtcttttcaggagttgccactatcctaattctaacaccatagcttcgttttgtctgagactacgttccttttaatataactgaactgtttaattcatctgagaattctacctatgatgaaaaatgttgtggtggtagcatttgggttaattctgattatagagtctcttggagagcaatgtccataaactaatcccaaacaacattgtctttttgatgttgtagtgaacagcagagaatttcaaaggaccttgctaatatctgtaagacggcagctacagcaggcatcattggctgggtgtatgggggaataccagcttttattcatgctaaacaacaatacattgagcagagccaggcagaaatttatcataaccggtttgatgctgtgcaatctgcacatcgtgctgccacacgaggcttcattcgttatggctggcgctggggttggagaactgcagtgtttgtcactatattcaacacagtgaacactagtctgaatgtataccgaaataaagatgccttaagccattttgtaattgcaggagctgtcacgggaagtctttttaggataaacgtaggcctgcgtggcctggtggctggtggcataattggagccttgctgggcactcctgtaggaggcctgctgatggcatttcagaagtactctggtgagactgttcaggaaagaaaacagaaggatcgaaaggcactccatgagctaaaactggaagagtggaaaggcagactacaagttactgagcacctccctgagaaaattgaaagtagtttacaggaagatgaacctgagaatgatgctaagaaaattgaagcactgctaaaccttcctagaaacccttcagtaatagataaacaagacaaggactgaaagtgctctgaacttgaaactcactggagagctgaagggagctgccatgtccgatgaatgccaacagacaggccactctttggtcagcctgctgacaaatttaagtgctggtacctgtggtggcagtggcttgctcttgtctttttcttttctttttaactaagaatggggctgttgtactctcactttacttatccttaaatttaaatacatacttatgtttgtattaatctatcaatatatgcatacatgaatatatccacccacctagattttaagcagtaaataaaacatttcgcaaaagattaaagttgaattttacagttcgtatattcatgtggtcctttgaaagggtattctagaaatcactggaaagaggagaggaaagaaccaggtaggcaaatggtctgtgaaacccttgggtcctggaagcagtgtgagtgtaaatgtgtagtgtttggtttcatctaaataaacaaagatgatttctttgacacttgaaataaaatacaaattcaacaaaaagtagatcagcattattaaagaaacggttcaactttgtttcttcccttagtattgctgacaaagtatctgctgtagaatacaggaattacttagaatagaaacatagtcatcacaactgttactaaatggaaaagaaaagaattattgagttaagtattcctgtcaatacgggaaacactgctagtaccttatgttggtgttagacctctctgccctacactgagaatatagttttacacaggagcaaggtttgtgaagcagcatagtgaggtagctaaagccatgggctggctctaaaggctttaaatcccagccatgtggcttagctgccatgagatgtgcatttgagaaatgttgtcttcttttgctgttcaactccagattttcagatgataatgtgattatcccagcttaagttgcgtccacttctggtctagtgaattgtggaaggcagttttagagaaaggagtcatgagtaacatgaacagcagttggctatgtctttccagttctctgctgatgtcagaaagacccagaaataccaaggagaaaaagccatcttagggatctaaggaggccctatggaaagttactaccttagacatttgaagatagcttactgcttagtacatacactgtaaacaacgatctcattttaaatgagaactttctcataaatattttacaaatgaggtcaaactagcataaagccatttaaagagattatcagtccaatatgaaccagttaagtctttggactatccctttcctccttgactactgctt

SEQ ID NO: 80 - DNA, 900 bp, Homo sapiens
  misc_feature: Incyte ID No: 409194.1
aacagaagttagaaggggaaatgtcgcctctctgaagattacccaaagaaaaagtgatttgtcattgctttatagactgtaagaagagaacatctcagaagtggagtcttaccctgaaatcaaaggatttaaagaaaaagtggaatttttcttcagcaagctgtgaaactaaatccacaacctttggagacccaggaacaccctccaatctctgtgtgttttgtaaacatcactggagggtcttctacgtgagcaattggattgtcatcagccctgcctgttttgcacctgggaagtgccctggtcttacttgggtccaaattgttggctttcacttttgaccctaagcatctgaagccatgggccacacacggaggcagggaacatcaccatccaagtgtccatacctcaatttctttcagctcttggtgctggctggtctttctcacttctgttcaggtgttatccacgtgaccaaggaagtgaaagaagtggcaacgctgtcctgtggtcacaatgtttctgttgaagagctggcacaaactcgcatctactggcaaaaggagaagaaaatggtgctgactatgatgtctggggacatgaatatatggcccgagtacaagaaccggaccatctttgatatcactaataacctctccattgtgatcctggctctgcgcccatctgacgagggcacatacgagtgtgttgttctgaagtatgaaaaagacgctttcaagcgggaacacctggctgaagtgacgttatcagtcaaaggttggtgggattttctgattttactctaggccggcagattcttaatgcccttaaagacacatggctattgatttaggtgaaaattttaccaaagagggatgtatctcacttcatttcttggag

SEQ ID NO: 81 - DNA, 1866 bp, Homo sapiens
  misc_feature: Incyte ID No: 258971CB1
  unsure 1776: a, t, c, g, or other
ccagatctcagaggagcctggctaagcaaaaccctgcagaacggctgcctaatttacagcaaccatgagtacaaatggtgatgatcatcaggtcaaggatagtctggagcaattgagatgtcactttacatgggagttatccattgatgacgatgaaatgcctgatttagaaaacagagtcttggatcagattgaattcctagacaccaaatacagtgtgggaatacacaacctactagcctatgtgaaacacctgaaaggccagaatgaggaagccctgaagagcttaaaagaagctgaaaacttaatgcaggaagaacatgacaaccaagcaaatgtgaggagtctggtgacctggggcaactttgcctggatgtattaccacatgggcagactggcagaagcccagacttacctggacaaggtggagaacatttgcaagaagctttcaaatcccttccgctatagaatggagtgtccagaaatagactgtgaggaaggatgggccttgctgaagtgtggaggaaagaattatgaacgggccaaggcctgctttgaaaaggtgcttgaagtggaccctgaaaaccctgaatccagcgctgggtatgcgatctctgcctatcgcctggatggctttaaattagccacaaaaaatcacaagccattttctttgcttcccctaaggcaggctgtccgcttaaatccagacaatggatatattaaggttctccttgccctgaagcttcaggatgaaggacaggaagctgaaggagaaaagtacattgaagaagctctagccaacatgtcctcacagacctatgtctttcgatatgcagccaagttttaccgaagaaaaggctctgtggataaagctcttgagttattaaaaaaggccttgcaggaaacacccacttctgtcttactgcatcaccagatagggctttgctacaaggcacaaatgatccaaatcaaggaggctacaaaagggcagcctagagggcagaacagagaaaagctagacaaaatgataagatcagccatatttcattttgaatctgcagtggaaaaaaagcccacatttgaggtggctcatctagacctggcaagaatgtatatagaagcaggcaatcacagaaaagctgaagagaattttcaaaaattgttatgcatgaaaccagtggtagaagaaacaatgcaagacatacatttccactatggtcggtttcaggaatttcaaaagaaatctgacgtcaatgcaattatccattatttaaaagctataaaaatagaacaggcatcattaacaagggataaaagtatcaattctttgaagaaattggttttaaggaaacttcggagaaaggcattagatctggaaagcttgagcctccttgggttcgtctacaaattggaaggaaatatgaatgaagccctggagtactatgagcgggccctgagactggctgctgactttgagaactctgtgagacaaggtccttaggcacccagatatcagccactttcacatttcatttcattttatgctaacatttactaatcatcttttctgcttactgttttcagaaacattataattcactgtaatgatgtaattcttgaataataaatctgacaaaatattagttgtgttcaacaattagtgaaacagaatgtgtgtatgcatgtaagaaagagaaatcatttgtatgagtgctatgtagtagagaaaaaatgttagttaactttgtaggaaataaaacattggacttacactanaagagagggagggggggggggaaggagggggaggagggaggcgggaggggggggaggggggagaagggaaaaaaaagggggggccctctt

SEQ ID NO: 82 - DNA, 2741 bp, Homo sapiens
  misc_feature: Incyte ID No: 231486.27
aggcatgagtccctatacccagccattttttttcaattttttttgagccttagttgaactcacagatgcagaacccatggatacagaaggctaactgtctatctttacactgacatgggtaagttcatttattacaatttaattcaactagattcaattcaataaatgtttattgatattatctttaaggttgagccagtgtgttactctcttatcagctacacagatcatgaaaaaaattcccccgcactaaaaattgtacaattttataaatagtggtgaggggatgggagtgtgggataagaaaaagttgacaagagattatgtacgattgagtgtgataaatataatgaaacaatgaaaaataaagtgctttaaaagtttagagaaggaaagtatagtgttaaaggggttcggggagatttcatcaatggaacggcacagggaaacggctttcaaggagaagaaatatttcacaaaatgaagagacaaaaagggccaacaaattcagcataagacaatatattaatggaggaaaagtcagcatgtttgggaaatgtggagttcaggttagtgaagggctggatctttgtaggcagagataaaatgggcaaggaacatttgcatgaagtaattttatttaattaggagcattatgaggaatcacagcaattttttgaaagagtaatgatatgatcaaagttaattaaagttatgatcttcagaaaaattaatctggcactgtgtacagaatagattggaatcaaaaggaacctggaggtgggaacaccagttgggagaatgcaatgatagcaagtatttgttgagcactaagtatgtgatagattttcttaatcagtccttataacaagcctatgaaatgggtactatcattactgcattttacaagtgaggaaacaaagaaaacagagtaaacatctgccaacgtttattgacagtgctgagcagtgacagataaatatttcgaacctaggcagtttgattctagaggtaaaatagtctaaacaagaattaaacgttaaactggtctaataaaatctacttatccagagaatgttttttaaaagaaacaggaaatatatggactgtaggataggtgtcataaaaattttgtttctaaatcatttagaatccactgcatgtattccaaattacaattatcagtgacattagaacttgatatgtgaagttcttcaagagtactttgtgagaccagatctccatttttttccaatgggaaattattgcaagttcctacatcttgatattgctttcgtaatttatactaacataaaataatatttttcactgttttgcaatgtctttttaatttctgtattgcagctagaggaagtccaaagaaaacttggatttgctctttctgacatctcggtggttagcaattattcctctgagtgggagctggaccctgtaaaggatgttctaattctttctgctctgagacgaatgctatgggctgcagatgacttcttagaggatttgccttttgagcaaataggtagatgtgtttggtggtgtggaagcttggaagcggtcaggtagttggctactttctgcttggatctattaaatacctggcagctctctgtctttttgtgggttgttgccctgtgattagttctgctttttaacccactccctggatgcatttttccctccttgcatttccctcttttcctggagttcatactagagaatctgcactatgtttttccctttttgtcttgagatgaaagttttaaaataatccacctctgtcatttccactctctgaacatcccaagctgtatccctggcctcttttctcagactatgtttctttacttgggacctagaactggattggattggcattgctcctgatcagatgagacctttgattatttgccccttccttaggaccttacactcctgtctttctttgacttgcctttttgtttctttccttcatcttagtccctcttcatgcagtatggtcattgctaggtagaggtatgtccttttatgtaatggccaccgcatttagtattacataaactttcttttaacaatctgtgcatagtacatgctgctctgttccatttagagatttgacagaggtttcagtttagtatactcaaatcttattttagtgcttgggaaatcaattcagaatatcacatcctctccaattctctcttactcaaattgctgggaaactctcatgttactaactttgttgctctaactctgccatcttggtttccccatcccttctcttcctcatggtacgtgtgctcctaatattagcgttggttgagattttcagtggtccaatattcctcttccctctggttgcctttcctgagataatccactaagaatattttgtgtttcttttctcagggaatctaagggaggaaattatcaactgtgcacaaggaaaaaaatagatatgtgaaaggttcacgtaaatttcctcacatcacagaagattaaaattcagaaaggagaaaacacagaccaaagagaagtatctaagaccaaagggatgtgttttattaatgtctaggatgaagaaatgcatagaacattgtagtacttgtaaataactagaaataacatgatttagtcataattgtgaaaaataataataatttttcttggatttatgttctgtatctgtgaaaaaataaatttcttataaaactcggaaaaaa

SEQ ID NO: 83 - DNA, 2848 bp, Homo sapiens
  misc_feature: Incyte ID No: 1930967CB1
ggaattccctgcagcatgggctggttaactaggattgtctgtcttttctggggagtattacttacagcaagagcaaactatcagaatgggaagaacaatgtgccaaggctgaaattatcctacaaagaaatgttggaatccaacaatgtgatcactttcaatggcttggccaacagctccagttatcataccttccttttggatgaggaacggagtaggctgtatgttggagcaaaggatcacatattttcattcgacctggttaatatcaaggattttcaaaagattgtgtggccagtatcttacaccagaagagatgaatgcaagtgggctggaaaagacatcctgaaagaatgtgctaatttcatcaaggtacttaaggcatataatcagactcacttgtacgcctgtggaacgggggcttttcatccaatttgcacctacattgaaattggacatcatcctgaggacaatatttttaagctggagaactcacattttgaaaacggccgtgggaagagtccatatgaccctaagctgctgacagcatcccttttaatagatggagaattatactctggaactgcagctgattttatggggcgagactttgctatcttccgaactcttgggcaccaccacccaatcaggacagagcagcatgattccaggtggctcaatgatccaaagttcattagtgcccacctcatctcagagagtgacaatcctgaagatgacaaagtatactttttcttccgtgaaaatgcaatagatggagaacactctggaaaagctactcacgctagaataggtcagatatgcaagaatgactttggagggcacagaagtctggtgaataaatggacaacattcctcaaagctcgtctgatttgctcagtgccaggtccaaatggcattgacactcattttgatgaactgcaggatgtattcctaatgaactttaaagatcctaaaaatccagttgtatatggagtgtttacgacttccagtaacattttcaagggatcagccgtgtgtatgtatagcatgagtgatgtgagaagggtgttccttggtccatatgcccacagggatggacccaactatcaatgggtgccttatcaaggaagagtcccctatccacggccaggaacttgtcccagcaaaacatttggtggttttgactctacaaaggaccttcctgatgatgttataacctttgcaagaagtcatccagccatgtacaatccagtgtttcctatgaacaatcgcccaatagtgatcaaaacggatgtaaattatcaatttacacaaattgtcgtagaccgagtggatgcagaagatggacagtatgatgttatgtttatcggaacagatgttgggaccgttcttaaagtagtttcaattcctaaggagacttggtatgatttagaagaggttctgctggaagaaatgacagtttttcgggaaccgactgctatttcagcaatggagctttccactaagcagcaacaactatatattggttcaacggctggggttgcccagctccctttacaccggtgtgatatttacgggaaagcgtgtgctgagtgttgcctcgcccgagacccttactgtgcttgggatggttctgcatgttctcgctattttcccactgcaaagagacgcacaagacgacaagatataagaaatggagacccactgactcactgttcagacttacaccatgataatcaccatggccacagccctgaagagagaatcatctatggtgtagagaatagtagcacatttttggaatgcagtccgaagtcgcagagagcgctggtctattggcaattccagaggcgaaatgaagagcgaaaagaagagatcagagtggatgatcatatcatcaggacagatcaaggccttctgctacgtagtctacaacagaaggattcaggcaattacctctgccatgcggtggaacatgggttcatacaaactcttcttaaggtaaccctggaagtcattgacacagagcatttggaagaacttcttcataaagatgatgatggagatggctctaagaccaaagaaatgtccaatagcatgacacctagccagaaggtctggtacagagacttcatgcagctcatcaaccaccccaatctcaacacgatggatgagttctgtgaacaagtttggaaaagggaccgaaaacaacgtcggcaaaggccaggacataccccagggaacagtaacaaatggaagcacttacaagaaaataagaaaggtagaaacaggaggacccacgaatttgagagggcacccaggagtgtctgagctgcattacctctagaaacctcaaacaagtagaaacttgcctagacaataactggaaaaacaaatgcaatatacatgaacttttttcatggcattatgtggatgtttacaatggtgggaaattcagctgagttccaccaattataaattaaatccatgagtaactttcctaataggctttttttcctaataccaccacctaacagagaacacaggtgaatgcagatgttcactttagcagacttaatgtttcctatgagatttcactgtacaggtttgtctttcttctttgcctgagaaataaaaatgtcatttgccatattgccatctaaaggagaaaaactgcatcagcaaagccattgtattgaactaaaagtttaaaatgaactgcatggatttactaagctgatgaatattccaaaacgtggttggattcaaggatatattttgtctaccggccctcatgtttgtatgtacttgaggagtaaaatgagtaaaatgatactgaatgaaatac

SEQ ID NO: 84 - DNA, 2327 bp, Homo sapiens
  misc_feature: Incyte ID No: 279117.32
  unsure 20: a, t, c, g, or other
ggtgtaataacagtaaatanaaaatcattagtaagtaaataaaatagcttaccagcaactattaatatactcatgatacactttttatatttctttgctacatacctagatcctatatgctgtcattatatttcagtattttgcatttatatttgcattgtgagatgaatctatggttttctttttagaatgcttttaccaattagtattgcactcatggatttgaaagtttaacattatacaataccaatttattatttccaaatgttgacattttattatagtgattttctattccaaaatgtctacaatttagctaaaaattatctagtcctgctaatttattggttgaagatcattatttgcatttcttatccttgccataaaaaatgtattctctactttgttaaatttcttgctgtagtaatcaaaaagggcaaatgttaatatctttatctgtatagtgttgagtttacggtggctagtaagttgtcagctgcatttttcatttttttaaatttcagaattaaaaaataaaacataagagttttcattactagcttcaaatgcttcaatgacagctattagcagaaaaatactaacatgtacaagaaaggatttgtattagtttatttcaccacagtagtatttcattacacataatccctaaaactcagcagcttgcaataagtgtttatactcatgcttatgggtgtgtaggtcaactgtgtttcagtggatgtatttaagcactgacttaggctgcatgttaacctcaatctgctccaggtagatttgttctatggctgtagcagcagcagctacctgagtcatgcttttctagtggcttgtcactgaagatcataagccaggccaaagcacttagccaagtttaaggacactactcatgtcatatctgctaacacccgttgttcaaacaagtaacatggccaagcctaattatgaaggaacagtaagtatactggccctacagaaggagagggaatgaaatgaatatttgatgaacagtattatgctatcagcttcatattagatgtttatttctagtattttacaaactatccacttgtactcaaataaaatgagtcaagtatttttagattccccacatttatttagctgaaaaggacactcctctgttaatacaactatatgtgtacatagttttgtgaatttcagctacattcagtccccacctgccctcctagaggagttgccttagtctgagcaaagtccattcaaccctatatgatggccctgggctttcctcaggcagaattgtaaaattaggaaacttctacttcggagctcatttgttcatacactcttcatcttttattcacaccccactagttatccactctcaacctcaacccttggcgtggggcatttcatcaagttacttattggtatttgcctttactccaaactgctaatcttttctaggtgcttagcatttcatgtttggcaactcacagtgggtagtaataagccttttcatcatatttaatctttcagtctgtgtaaactgtgcttctcctaaagcagaagtctaataggagttttgttcattaacttcctgatggcttctagaaatgtcatcaaagaaacatttcatatttatatccttttttgcttaaattttcttttgggtcaattcaaataatttattaatgtctatattaatataaaatagaaattgttaaatatttcaggaaaactttctgaaatataatttctccgtacaatgaaacagtttttttcatatatctataaatagatacaggagcctccagttatctaatgagggttacatatggtgcataattttaataccatatttgtttcatcttacttcaaatttgaaagtacttttgctataagtttcctaaaagtatttaatacttttttttttcaatttagattaaatctcttgatgaacagtgtgtggttggcaaaatttccaagcactggactggaattttgagagaggcatttacagacgctgataactttggaatccagttccctttagaccttgatgttaaaatgaaagctgtaatgattggtgcctgtttcctcattgacttcatgttttttgaaagcactggcagccaggaacaaaaatcaggagtggtagtggattagtgaaagtctcctcaggaaatctgaagtctgtatattgattgagactatctaaactcatacctgtatgaattaagctgtaaggcctgtagctctggttgtatacttttgcttttcaaattatagtttatcttctgtataactgatttataaaggttttt

SEQ ID NO: 85 - DNA, 1549 bp, Homo sapiens
  misc_feature: Incyte ID No: 898547.1
aacacatcagatattttcagcactaaaagagatggttttccccacatatatgtaaaagaaatttgcaagactactgggtatcagaatggcaaagcaacttaaccttccagaaaatacagatgattggacaaaagaggatgtaaatcagtggttagaaagtcataagattgaccaaaaacacagggaaattttgactgaacaagacgtgaatggagcagtcttgaagtggttaaaaaaagaacatcttgttgatatgggcatcacacatggaccagctattcaaatagaagaactattcaaagaattgcggaaaacagccattgaagattcgattcagacatctaagatgggaaagcccagtaaaaatgctcctaaagaccaaactgtgtctcaaaaggaacgtagagaaacttcaaagcaaaaacaaaagggtaaagagaacccagatatggctaatccgtctgcaatgagtacaactgctaaaggttctaagtcactaaaagttgagctcatagaagataaaatagattatacaaaggaaaggcaaccatccatagacctgacatgtgtatcatatccatttgatgaattcagtaatccatatcgttacaagttggattttagtctacagcctgaaacaggaccaggcaatctcattgatccgatacatgaattcaaagccttcacaaatacagcaacagccacagaagaggatgtcaagatgaaatttagcaatgaggttttccgatttgcttcagcttgtatgaattcacgtaccaatggcactattcattttggagtcaaagacaaaccccatgggaaaattgttggcatcaaagtcaccaatgataccaaggaagccctcattaaccatttcaatctgatgataaacaagtattttgaagaccatcaagtccaacaagcaaagaagtgcattcgagagccaagatttgtggaagttttactgccaaatagtactctatctgacagatttgttattgaagtggacattattccacagttctctgaatgccaatatgattacttccagattaaaatgcaaaattacaacaacaaaatatgggaacaaagtaaaaaattctcactatttgtgcgagatgggaccagctctaaggacattacgaaaaataaagttgatttcagagcatttaaagcagattttaaaacactggcagagtccagaaaagcagcagaagaaaaattcagagcaaaaacaaataaaaaagaaagagagggaccaaagttggttaaattattgacaggaaatcaagatttgttagataattcatactatgaacagtacattcttgtaacaaataaatgccacccagatcaaacaaaacacttagatttcctgaaggaaattaaatggtttgctgtattggagtttgatcctgagtctaacatcaatggagtggtcaaagcttacaaagaaagccgagtagcaaaccttcactttccaagtgtatatgtagaacagaaaaccacaccaaatgagacgatttctactctaaatctttaccatcaa

SEQ ID NO: 86 - DNA, 2989 bp, Homo sapiens
  misc_feature: Incyte ID No: 202212.16
  unsure 1451-1640: a, t, c, g, or other
cagaacccagaaaaacaactcattcgctttcatttcctcactgactataaaagaatagagaaggaagggcttcagtgaccggctgcctggctgacttacagcagtcagactctgacaggatcatggctatgatggaggtccaggggggacccagcctgggacagacctgcgtgctgatcgtgatcttcacagtgctcctgcagtctctctgtgtggctgtaacttacgtgtactttaccaacgagctgaagcagatgcaggacaagtactccaaaagtggcattgcttgtttcttaaaagaagatgacagttattgggaccccaatgacgaagagagtatgaacagcccctgctggcaagtcaagtggcaactccgtcagctcgttagaaagatgattttgagaacctctgaggaaaccatttctacagttcaagaaaagcaacaaaatatttctcccctagtgagagaaagaggtcctcagagagtagcagctcacataactgggaccagaggaagaagcaacacattgtcttctccaaactccaagaatgaaaaggctctgggccgcaaaataaactcctgggaatcatcaaggagtgggcattcattcctgagcaacttgcacttgaggaatggtgaactggtcatccatgaaaaagggttttactacatctattcccaaacatactttcgatttcaggaggaaataaaagaaaacacaaagaacgacaaacaaatggtccaatatatttacaaatacacaagttatcctgaccctatattgttgatgaaaagtgctagaaatagttgttggtctaaagatgcagaatatggactctattccatctatcaagggggaatatttgagcttaaggaaaatgacagaatttttgtttctgtaacaaatgagcacttgatagacatggaccatgaagccagttttttcggggcctttttagttggctaactgacctggaaagaaaaagcaataacctcaaagtgactattcagttttcaggatgatacactatgaagatgtttcaaaaaatctgaccaaaacaaacaaacagaaaacagaaaacaaaaaaacctctatgcaatctgagtagagcagccacaaccaaaaaattctacaacacacactgttctgaaagtgactcacttatcccaagagaatgaaattgctgaaagatctttcaggactctacctcatatcagtttgctagcagaaatctagaagactgtcagcttccaaacattaatgcaatggttaacatcttctgtctttataatctactccttgtaaagactgtagaagaaagagcaacaatccatctctcaagtagtgtatcacagtagtagcctccaggtttccttaagggacaacatccttaagtcaaaagagagaagaggcaccactaaaagatcgcagtttgcctggtgcatgtgnnnnnnnnnnnnnnnnnnnnnnnnnnnnnnnnnnnnnnnnnnnnnnnnnnnnnnnnnnnnnnnnnnnnnnnnnnnnnnnnnnnnnnnnnnnnnnnnnnnnnnnnnnnnnnnnnnnnnnnnnnnnnnnnnnnnnnnnnnnnnnnnnnnnnnnnnnnnnnnnnnnnnnnnnnnnnnnnnnnnnnnnnnnnnnagtggtgcctcttctctcttttgacttaaggatgttgtcccttaaggaaacctggaggctactactgtgatacactacttgagagatggattgttgcgctttcttctacagtctttacaaggagtagattataaagacagaagatgttaaccattgcattaatgtttggaagctgacagtcttctagatttctgctagcaaactgatatgaggtagagtcctgaaagatctttcagcaatttcattttcttgggataagtgagtcactttcagaacagtgtgtgttgtagaattttttggttgtggctgctctactcagattgcatagaggtttttttgttttctgttttctgtttgtttgttttggtcagattttttgaaacatcttcatagtgtatcatcctgaaaactgaatagtcactttgaggttattgctttttctttccaggtcagttagccaactaaaaaggccccgaaaaaactggcttcatggtccatgtctatcaagtgctcatttgttacagaaacaaaaattctgtcattttccttaagctcaaatattcccccttgatagatggaatagagtccatattctgcatctttagaccaacaactatttctagcacttttcatcaacaatatagggtcaggataacttgtgtatttgtaaatatattggaccatttgtttgtcgttctttgtgttttcttttatttcctcctgaaatcgaaagtatgtttgggaatagatgtagtaaaaccctttttcatggatgaccagttcaccattcctcaagtgcaagttgctcaggaatgaatgcccactccttgatgattcccaggagtttattttgcggcccagagccttttcattcttggagtttggagaagacaatgtgttgcttcttcctctggtcccagttatgtgagctgctactctctgaggacctctttctctcactaggggagaaatattttgttgcttttctttctaacgagctgacggagttgccacttgacttgccagcaggggctgttcatactctcttcgtcattggggtcccaataactgtcatcttcttttaagaaacaagcaatgccacttttggagtacttgtcctgcatctgcttcagctcgttggtaaagtacacgtaagttacagccacacagagagactgcaggagcactgtgaagatcacgatcagcacgcaggtctgtcccaggctgggtcccccctggacctccatcatagccatgatcctgtcagagtctgactgctgtaagtcagccaggcagccggtcactgaagctcagcacactgacgccgtccgctcgagcatgcatctaga

SEQ ID NO: 87 - DNA, 1813 bp, Homo sapiens
  misc_feature: Incyte ID No: 2874529CB1
cagaatcaacatccacacttccgtgattatctgcgtgcattttggacaaagcttccaaccaggatacgggaagaagaaatggctggtgatctttcagcaggtttcttcatggaggaacttaatacataccgtcagaagcagggagtagtacttaaatatcaagaactgcctaattcaggacctccacatgataggaggtttacatttcaagttataatagatggaagagaatttccagaaggtgaaggtagatcaaagaaggaagcaaaaaatgccgcagccaaattagctgttgagatacttaataaggaaaagaaggcagttagtcctttattattgacaacaacgaattcttcagaaggattatccatggggaattacataggccttatcaatagaattgcccagaagaaaagactaactgtaaattatgaacagtgtgcatcgggggtgcatgggccagaaggatttcattataaatgcaaaatgggacagaaagaatatagtattggtacaggttctactaaacaggaagcaaaacaattggccgctaaacttgcatatcttcagatattatcagaagaaacctcagtgaaatctgactacctgtcctctggttcttttgctactacgtgtgagtcccaaagcaactctttagtgaccagcacactcgcttctgaatcatcatctgaaggtgacttctcagcagatacatcagagataaattctaacagtgacagtttaaacagttcttcgttgcttatgaatggtctcagaaataatcaaaggaaggcaaaaagatctttggcacccagatttgaccttcctgacatgaaagaaacaaagtatactgtggacaagaggtttggcatggattttaaagaaatagaattaattggctcaggtggatttggccaagttttcaaagcaaaacacagaattgacggaaagacttacgttattaaacgtgttaaatataataacgagaaggcggagcgtgaagtaaaagcattggcaaaacttgatcatgtaaatattgttcactacaatggctgttgggatggatttgattatgatcctgagaccagtgatgattctcttgagagcagtgattatgatcctgagaacagcaaaaatagttcaaggtcaaagactaagtgccttttcatccaaatggaattctgtgataaagggaccttggaacaatggattgaaaaaagaagaggcgagaaactagacaaagttttggctttggaactctttgaacaaataacaaaaggggtggattatatacattcaaaaaaattaattcatagagatcttaagccaagtaatatattcttagtagatacaaaacaagtaaagattggagactttggacttgtaacatctctgaaaaatgatggaaagcgaacaaggagtaagggaactttgcgatacatgagcccagaacagatttcttcgcaagactatggaaaggaagtggacctctacgctttggggctaattcttgctgaacttcttcatgtatgtgacactgcttttgaaacatcaaagtttttcacagacctacgggatggcatcatctcagatatatttgataaaaaagaaaaaactcttctacagaaattactctcaaagaaacctgaggatcgacctaacacatctgaaatactaaggaccttgactgtgtggaagaaaagcccagagaaaaatgaacgacacacatgttagagcccttctgaaaaagtatcctgcttctgatatgcagttttcctaaattatctaaaatctgctagggaatatcatagat

SEQ ID NO: 88 - DNA, 2237 bp, Homo sapiens
  misc_feature: Incyte ID No: 2705515CB1
cacgcgtccgcccacgcgtccggctgatgcaatgaccagctaatggctcgattctcaagagggtttcattggtctcaacctggccccccaggcaacccacccctgattggacagtctcatcaagaaggttggtcaagagctcaagtgtttctgagaatctgggtgatttataagaaacccttagctgaatgcagggtggggagaacgaaagacaaaagcatcttttttcagaagggaaactgaaagaaagaggggaagagtattaaagaccatttctggctgggcagggcactctcagcagctcaactgcccagcgtgaccagtggccacctctgcagtgtcttccacaacctggtcttgactcgtctgctgaacaaatcctctgacctcaggccggctgtgaacgtagttcctgagagatagcaaacatgcccaacagtgagcccgcatctctgctggagctgttcaacagcatcgccacacaaggggagctcgtaaggtccctcaaagcgggaaatgcgtcaaaggatgaaattgattctgcagtaaagatgttggtgtcattaaaaatgagctacaaagctgccgcgggggaggattacaaggctgactgtcctccagggaacccagcacctaccagtaatcatggcccagatgccacagaagctgaagaggattttgtggacccatggacagtacagacaagcagtgcaaaaggcatagactacgataagctcattgttcggtttggaagtagtaaaattgacaaagagctaataaaccgaatagagagagccaccggccaaagaccacaccacttcctgcgcagaggcatcttcttctcacacagagatatgaatcaggttcttgatgcctatgaaaataagaagccattttatctgtacacgggccggggcccctcttctgaagcaatgcatgtaggtcacctcattccatttattttcacaaagtggctccaggatgtatttaacgtgcccttggtcatccagatgacggatgacgagaagtatctgtggaaggacctgaccctggaccaggcctatagctatgctgtggagaatgccaaggacatcatcgcctgtggctttgacatcaacaagactttcatattctctgacctggactacatggggatgagctcaggtttctacaaaaatgtggtgaagattcaaaagcatgttaccttcaaccaagtgaaaggcattttcggcttcactgacagcgactgcattgggaagatcagttttcctgccatccaggctgctccctccttcagcaactcattcccacagatcttccgagacaggacggatatccagtgccttatcccatgtgccattgaccaggatccttactttagaatgacaagggacgtcgcccccaggatcggctatcctaaaccagccctgttgcactccaccttcttcccagccctgcagggcgcccagaccaaaatgagtgccagcgaccccaactcctccatcttcctcaccgacacggccaagcagatcaaaaccaaggtcaataagcatgcgttttctggagggagagacaccatcgaggagcacaggcagtttgggggcaactgtgatgtggacgtgtctttcatgtacctgaccttcttcctcgaggacgacgacaagctcgagcagatcaggaaggattacaccagcggagccatgctcaccggtgagctcaagaaggcactcatagaggttctgcagcccttgatcgcagagcaccaggcccggcgcaaggaggtcacggatgagatagtgaaagagttcatgactccccggaagctgtccttcgactttcagtagcactcgttttacatatgcttataaaagaagtgatgtatcagtaatgtatcaataatcccagcccagtcaaagcaccgccacctgtaggcttctgtctcatggtaattactgggcctggcctctgtaagcctgtgtatgttatcaatactgtttcttcctgtgagttccattatttctatctcttatgggcaaagcattgtgggtaattggtgctggctaacattgcatggtcggatagagaagtccagctgtgagtctctccccaaagcagccccacagtggagcctttggctggaagtccatgggccaccctgttcttgtccatggaggactccgagggttccaagtatactcttaagacccactctgtttaaaaatatatattctatgtat

SEQ ID NO: 89 - DNA, 1617 bp, Homo sapiens
  misc_feature: Incyte ID No: 1328372.14
ccaaacccgcacagagcaggactgcagcctgaggaaagagcaaggatttcaggagagaggcctgcgacaagtgaggtgagggcttttgggggattgtcctggcgcctggagtgtgggggcctggcaggggccctgaacggggacagtgaggtcctgtacttgctggcctggggtggacagaacccaagcctgggtaaaatccccagggccccctaaacccaacacttaggaagtcactagtcctgacttgagtttctgatgaggaagcctctctccttagccttcagcctttcctcccaccctgccataaagtaatttgatcctcaagaagttaaaccacacctcattggtccctggctaattcaccaatttacaaacagcaggaaatagaaacttaagagaaatacacacttctgagaaactgaaacgacaggggaaaggaggtctcactgagcaccgtcccagcatccggacaccacagcggcccttcgctccacgcagaaaaccacacttctcaaaccttcactcaacacttccttccccaaagccagaagatgcacaaggaggaacatgaggtggctgtgctgggggcaccccccagcaccatccttccaaggtccaccgtgatcaacatccacagcgagacctccgtgcccgaccatgtcgtctggtccctgttcaacaccctcttcttgaactggtgctgtctgggcttcatagcattcgcctactccgtgaagtctagggacaggaagatggttggcgacgtgaccggggcccaggcctatgcctccaccgccaagtgcctgaacatctgggccctgattctgggcatcctcatgaccattggattcatcctgttactggtattcggctctgtgacagtctaccatattatgttacagataatacaggaaaaacggggttactagtagccgcccatagcctgcaacctttgcactccactgtgcaatgctggccctgcacgctggggctgttgcccctgcccccttggtcctgcccctagatacagcagtttatacccacacacctgtctacagtgtcattcaataaagtgcacgtgcttgtgatgatgctgtgacttcatctggagtgggggccctgctgaggggtcccggcctagtcctgagacagcccagtgctcagcccctgcacagccgtatccctcctctgtgaagctctcaggggagcagggatatgctcagaatctgctggtttccgcctcctgctgtgggcagcatctggaccaggaacgtggggtgggcatttctctgacaccaaggtaaggacacactgtccagaatacctttgggccaggacaacctgcctctgagctggctgggcagctggtcttgcagatgtgtgcaccttaggccctgtgggaggggcaggggctttgttcctagggtagcagctgaaggaacctcagggctgctgcctctcctgggtgatccaggtgtgctggatcctagcagctgcctcctccagtccagccaggcatcttccctgctctcctggggtgggggcagccaatggcccgagggtggggcgctcgcgagggcactgggagggcagcttccgaccgggagccccccc

SEQ ID NO: 90 - DNA, 5284 bp, Homo sapiens
  misc_feature: Incyte ID No: 253534.20
tgacgcaccctcggggtccatcgtagttggccgggatcgttgagtggtagcggtggacgaagggtaggcaggacagtcccgggggtggcagaaggagcccgggcacagctgagacctgcgcgtcccatcccaccaacactcacagcaggtgctgccgagctgggcaattgggatggcccaagttactttggttaaattttaaatcacgtttgttactgggaacgtagagtccagtgatgctaaccgcgcctctacctccaccaccggtgtcagtcccaaagggctcctaaaatggctgtgtcatctttcagccttggaccgcagttgccggccaggaatcccagtgtcacggtggacacgcctccctcgcgcccttgccgcccacctgctcacccagctcaggggctttggaattctgtggccacactgcgaggagatcggttctgggtcggaggctacaggaagactcccactccctgaaatctggagtgaagaacgccgccatccagccaccattccaaggaggtgcaggagaacagctctgtgataccatttaacttgttgacattacttttatttgaaggaacgtatattagagcttactttgcaaagaaggaagatggttgtttccgaagtggacatcgcaaaagctgatccagctgctgcatcccaccctctattactgaatggagatgctactgtggcccagaaaaatccaggctcggtggctgagaacaacctgtgcagccagtatgaggagaaggtgcgcccctgcatcgacctcattgactccctgcgggctctaggtgtggagcaggacctggccctgccagccatcgccgtcatcggggaccagagctcgggcaagagctccgtgttggaggcactgtcaggagttgcccttcccagaggcagcgggatcgtgaccagatgcccgctggtgctgaaactgaagaaacttgtgaacgaagataagtggagaggcaaggtcagttaccaggactacgagattgagatttcggatgcttcagaggtagaaaaggaaattaataaagcccagaatgccatcgccggggaaggaatgggaatcagtcatgagctaatcaccctggagatcagctcccgagatgtcccggatctgactctaatagaccttcctggcataaccagagtggctgtgggcaatcagcctgctgacattgggtataagatcaagacactcatcaagaagtacatccagaggcaggagacaatcagcctggtggtggtccccagtaatgtggacatcgccaccacagaggctctcagcatggcccaggaggtggaccccgagggagacaggaccatcggaatcttgacgaagcctgatctggtggacaaaggaactgaagacaaggttgtggacgtggtgcggaacctcgtgttccacctgaagaagggttacatgattgtcaagtgccggggccagcaggagatccaggaccagctgagcctgtccgaagccctgcagagagagaagatcttctttgagaaccacccatatttcagggatctgctggaggaaggaaaggccacggttccctgcctggcagaaaaacttaccagcgagctcatcacacatatctgtaaatctctgcccctgttagaaaatcaaatcaaggagactcaccagagaataacagaggagctacaaaagtatggtgtcgacataccggaagacgaaaatgaaaaaatgttcttcctgatagataaagttaatgcctttaatcaggacatcactgctctcatgcaaggagaggaaactgtaggggaggaagacattcggctgtttaccagactccgacacgagttccacaaatggagtacaataattgaaaacaattttcaagaaggccataaaattttgagtagaaaaatccagaaatttgaaaatcagtatcgtggtagagagctgccaggctttgtgaattacaggacatttgagacaatcgtgaaacagcaaatcaaggcactggaagagccggctgtggatatgctacacaccgtgacggatatggtccggcttgctttcacagatgtttcgataaaaaattttgaagagttttttaacctccacagaaccgccaagtccaaaattgaagacattagagcagaacaagagagagaaggtgagaagctgatccgcctccacttccagatggaacagattgtctactgccaggaccaggtatacaggggtgcgttgcagaaggtcagagagaaggagctggaagaagaaaagaagaagaaatcctgggattttggggctttccagtccagctcggcaacagactcttccatggaggagatctttcagcacctgatggcctatcaccaggaggccagcaagcgcatctccagccacatccctttgatcatccagttcttcatgctccagacgtacggccagcagcttcagaaggccatgctgcagctccgacaggacaaggacacctacagctggctcctgaaggagcggagcgacaccagcgacaagcggaagttcctgaaggagcggcttgcacggctgacgcaggctcggcgccggcttgcccagttccccggttaaccacactctgtccagccccgtagacgtgcacgcacactgtctgcccccgttcccgggtagccactggactgacgacttgagtgctcagtagtcagactggatagtccgttcctgcttaatcaccacggctaacggataagcagagacggactatccagtctgactactgagcactcaagtcgtcagtccagtggctacccgggaacgggggcagacagtgtgcgtgcacgtctacggggctggacagagtgtggttaaccggggaactgggcaagccggcgccgagcctgcgtcagccgtgcaagccgctccttcaggaacttccgcttgtcgctggtgtcgctccgctccttcaggagccagctgtaggtgtccttgtcctgcaggagctgcagcatggccttctgaagctgctggccgtacgtctggagcatgaagaactggatgatcaaagggatgtggctggagatgcgcttgctggcctcctggtgataggccatcaggtgctgaaagatctcctccatggaagagtctgttgccgagctggattggaaagccccaaaatcccaggatttcttcttcttttcttcttccagctccttctctctgaccttctgcaatgcacccctgtatacctggtcctggcagtagacaatctgttccatctggaagtggaggcggatcagcttctcaccttctctctcttgttctgctctaatgtcttcaattttggacttggcggttctgtggaggttaaaaaactcttcaaaattttttatcgaaacatctgtgaaagcaagccggaccatatccgtcacggtgtgtagcatatccacagccggctcttccagtgccttgatttgctgtttcacgattgtctcaaatgtcctgtaattcacaaagcctggcagctctctaccacgatactgattttcaaatttctggatttttctactcaaaattttatggccttcttgaaaattgttttcaattattgtactccatttgtggaactcgtgtcggagtctggtaaacagccgaatgtcttcctcccctacagtttcctctccttgcatgagagcagtgatgtcctgattaaaggcattaattttatctatcaggaagaacattttttcattttcgtcttccggtatgtcgacaccatacttttgtagctcctctgttattctctggtgagtctccttgatttgattttctaacaggggcagagatttacagatatgtgtgatgagctcgctggtaagtttttctgccaggcagggaaccgtggcctttccttcctccagcagatccctgaaatatgggtggttctcaaagaagatcttctctctctgcagggcttcggacaggctcagctggtcctggatctcctgctggccccggcacttgacaatcatgtaacccttcttcaggtggaacacgaggttccgcaccacgtccacaaccttgtcttcagttcctttgtccaccagatcaggcttcgtcaagattccgatggtcctgtctccctcggggtccacctcctgggccatgctgagagcctctgtggtggcaatgtccacattactggggaccaccaccaggctgattgtctcctgcctctggatgtacttcttgatgagtgtcttgatcttatacccaatgtcagcaggctgattgcccacagccactctggttatgccaggaaggtctattagagtcagatccgggacatctcgggagctgatctccagggtgattagctcatgactgattcccattccttccccggcgatggcattctgggctttattaatttccttttctacctctgaagcatccgaaatctcaatctcgtagtcctggtaactgaccttgcctctccacttatcttcgttcacaagtttcttcagtttcagcaccagcgggcatctggtcacgatcccgctgcctctgggaagggcaactcctgacagtgcctccaacacggagctcttgcccgagctctggtccccgatgacggcgatggctggcagggccaggtcctgctccacacctagagcccgcagggagtcaatgaggtcgatgcaggggcgcaccttctcctcatactggctgcacaggttgttctcagccaccgagcctggatttttctgggccacagtagcatctccattcagtaatagagggtgggatgcagcagctggatcagcttttgcgatgtccacttcggaaacaaccatcttccttctttgcaaagtaagcttaaaataaagcagatgcctctaatatacgttccttcaaataaaagtaatgtcaacaagttaaatggtatcacagagctgttctcctgcacctccttggaatggtggctggatggcggcgttcttcactccagatttcagggagtgggagtcttcctgtagcctccgacccagaaccgatctcctcgcagtgtggccacagaattccaaagcccctgagctgggtgagcaggtgggcggcaagggcgcgagggaggcgtgtccaccgtgacactgggattcctggccggcaactgcggtccaaggcggtccctgcgcagtgcgggagtgcggcctccgctctcgcttcgcctctttcaccccgcgcccagccccgccccgcgccgcgaagaaatgaaactcacagaccctg

SEQ ID NO: 91 - DNA, 3020 bp, Homo sapiens
  misc_feature: Incyte ID No: 082155CB1
gcagatgctagaacataatgtagcattactttccccagggtttattgttatgtaagttcttgttcagcttcctttgttttctttcacttctgagaatttaactttcgtttctcactcagctcctgtggggaaactcatttgtggagaccagccctctggcttggtgagtgaatctggtttacaccggctcctgccctgccttcactcttctcccctgattcaagactcctctgctttggactgaagcactgcaggagtttgtgaccaagaacttcaagagtcaagacagaaggaagccaagggagcagtgcaatggatttctcagtaaaggtagacatagagaaggaggtgacctgccccatctgcctggagctcctgacagaacctctgagcctagattgtggccacagcttctgccaagcctgcatcactgcaaagatcaaggagtcagtgatcatctcaagaggggaaagcagctgtcctgtgtgtcagaccagattccagcctgggaacctccgacctaatcggcatctggccaacatagttgagagagtcaaagaggtcaagatgagcccacaggaggggcagaagagagatgtctgtgagcaccatggaaaaaaactccagatcttctgtaaggaggatggaaaagtcatttgctgggtttgtgaactgtctcaggaacaccaaggtcaccaaacattccgcataaacgaggtggtcaaggaatgtcaggaaaagctgcaggtagccctgcagaggctgataaaggaggatcaagaggctgagaagctggaagatgacatcagacaagagagaaccgcctggaagaattatatccagatcgagagacagaagattctgaaagggttcaatgaaatgagagtcatcttggacaatgaggagcagagagagctgcaaaagctggaggaaggtgaggtgaatgtgctggacaacctggcagcagctacagaccagctggtccagcagaggcaggatgccagcacgctcatctcagatctccagcggaggttgacgggatcgtcagtagagatgctgcaggatgtgattgacgtcatgaaaaggagtgaaagctggacattgaagaagccaaaatctgtttccaagaaactaaagagtgtattccgagtaccagatctgagtgggatgctgcaagttcttaaagagctgacagatgtccagtactactgggtggacgtgatgctgaatccaggcagtgccacttcgaatgttgctatttctgtggatcagagacaagtgaaaactgtacgcacctgcacatttaagaattcaaatccatgtgatttttctgcttttggtgtcttcggctgccaatatttctcttcggggaaatattactgggaagtagatgtgtctggaaagattgcctggatcctgggcgtacacagtaaaataagtagtctgaataaaaggaagagctctgggtttgcttttgatccaagtgtaaattattcaaaagtttactccagatatagacctcaatatggctactgggttataggattacagaatacatgtgaatataatgcttttgaggactcctcctcttctgatcccaaggttttgactctctttatggctgtgcctccctgtcgtattggggttttcctagactatgaggcaggcattgtctcatttttcaatgtcacaaaccacggagcactcatctacaagttctctggatgtcgcttttctcgacctgcttatccgtatttcaatccttggaactgcctagtccccatgactgtgtgcccaccgagctcctgagtgttctcattcctttacccacttctgcatagtagcccttgtgctgagactcagattctgcacctgagttcatctctactgagaccatctcttcctttctttccccttcttttacttagaatgtctttgtattcatttgctagggcttccatagcaaagcatcatagattgctgatttaaactgtaattgtattgccgtactgtgggctggaaatcccaaatctagattccagcagagttggttctttctgaggtctgcaaggaagggctctgttccatgcctctctccttggcttgtagaaggcatcttgtccctatgactcttcacattgtctttatgtacatctctgtgcccaagttttccctttttattaagacaccagtcatactggctcagggcccaccgctaatgccttaatgaaatcattttaacattatattctctacaaagaccttatttccaaataagataatatttggaggtattgggaataaaaactccaacatataaatttgaggaaggcacgatttcactcataacaatcttaccctttcttgcaagagatgcttgtacattattttcctaataccttggtttcactagtagtaaacattattattttttttatatttgcaaaggaaacatatctaatccttcctatagaaagaacagtattgctgtaattccttttcttttcttcctcatttcctctgccccttaaaagattgaagaaagagaaacttgtcaactcatatccacgttatctagcaaagtacataagaatctatcactaagtaatgtatccttcagaatgtgttggtttaccagtgacaccccatattcatcacaaaattaaagcaagaagtccatagtaatttatttgctaatagtggatttttaatgctcagagtttctgaggtcaaattttatcttttcacttacaagctctatgatcttaaataatttacttaatgtattttggtgtattttcctcaaattaatattggtgttcaagactatatctaattcctctgatcactttgagaaacaaacttttattaaatgtaaggcacttttctatgaattttaaatataaaaataaatattgttctgattattactgaaaagatgtcagccatttcaatgtcttgggaaacaattttttgtttttgttctgttttctttttgcttcaataaaacaatagctggc

SEQ ID NO: 92 - DNA, 2938 bp, Homo sapiens
  misc_feature: Incyte ID No: 1924205CB1
tgaacgtgcagcgagcttgtcaggaagatcggaggtgccaagtagcagagaaagcatcccccagctctgacagggagacagcacatgtctaaggcccacaagccttggccctaccggaggagaagtcaattttcttctcgaaaatacctgaaaaaagaaatgaattccttccagcaacagccaccgccattcggcacagtgccaccacaaatgatgtttcctccaaactggcagggggcagagaaggacgctgctttcctcgccaaggacttcaactttctcactttgaacaatcagccaccaccaggaaacaggagccaaccaagggcaatggggcccgagaacaacctgtacagccagtacgagcagaaggtgcgcccctgcattgacctcatcgactccctgcgggctctgggtgtggagcaggacctggccctgccagccatcgccgtcatcggggaccagagctcgggcaagagctctgtgctggaggcactgtcaggagtcgcgcttcccagaggcagcggaatcgtaaccaggtgtccgctggtgctgaaactgaaaaagcagccctgtgaggcatgggccggaaggatcagctaccggaacaccgagctagagcttcaggaccctggccaggtggagaaagagatacacaaagcccagaacgtcatggccgggaatggccggggcatcagccatgagctcatcagcctggagatcacctcccctgaggttccagacctgaccatcattgaccttcccggcatcaccagggtggctgtggacaaccagccccgagacatcggactgcagatcaaggctctcatcaagaagtacatccagaggcagcagacgatcaacttggtggtggttccctgtaacgtggacattgccaccacggaggcgctgagcatggcccatgaggtggacccggaaggggacaggaccatcggtatcctgaccaaaccagatctaatggacaggggcactgagaaaagcgtcatgaatgtggtgcggaacctcacgtaccccctcaagaagggctacatgattgtgaagtgccggggccagcaggagatcacaaacaggctgagcttggcagaggcaaccaagaaagaaattacattctttcaaacacatccatatttcagagttctcctggaggaggggtcagccacggttccccgactggcagaaagacttaccactgaactcatcatgcatatccaaaaatcgctcccgttgttagaaggacaaataagggagagccaccagaaggcgaccgaggagctgcggcgttgcggggctgacatccccagccaggaggccgacaagatgttctttctaattgagaaaatcaagatgtttaatcaggacatcgaaaagttagtagaaggagaagaagttgtaagggagaatgagacccgtttatacagcaaaatcagagaggattttaaaaactgggtaggcatacttgcaactaatacccaaaaagttaaaaatattatccacgaagaagttgaaaaatatgaaaagcagtatcgaggcaaggagcttctgggatttgtcaactacaagacatttgagatcatcgtgcatcagtacatccagcagctggtggagcccgcccttagcatgctccagaaagccatggaaattatccagcaagctttcattaacgtggccaaaaaacattttggcgaatttttcaaccttaaccaaactgttcagagcacgattgaagacataaaagtgaaacacacagcaaaggcagaaaacatgatccaacttcagttcagaatggagcagatggttttttgtcaagatcagatttacagtgttgttctgaagaaagtccgagaagagatttttaaccctctggggacgccttcacagaatatgaagttgaactctcattttcccagtaatgagtcttcggtttcctcctttactgaaataggcatccacctgaatgcctacttcttggaaaccagcaaacgtctcgccaaccagatcccatttataattcagtattttatgctccgagagaatggtgactccttgcagaaagccatgatgcagatactacaggaaaaaaatcgctattcctggctgcttcaagagcagagtgagaccgctaccaagagaagaatccttaaggagagaatttaccggctcactcaggcgcgacacgcactctgtcaattctccagcaaagagatccactgaagggcggcgatgcctgtggttgttttcttgtgcgtactcattcattctaaggggagtcggtgcaggatgccgcttctgctttggggccaaactcttctgtcactatcagtgtccatctctactgtactccctcagcatcagagcatgcatcaggggtccacacaggctcagctctctccaccacccagctcttccctgaccttcacgaagggatggctctccagtccttgggtcccgtagcacacagttacagtgtcctaagatactgctatcattcttcgctaatttgtatttgtattcccttccccctacaagattatgagaccccagagggggaaggtctgggtcaaattcttcttttgtatgtccagtctcctgcacagcacctgcagcattgtaactgcttaataaatgacatctcactgaacgaatgagtgctgtgtaagtgatggagatacctgaggctattgctcaagcccaggccttggacatttagtgactgttagccggtccctttcagatccagtggccatgccccctgcttcccatggttcactgtcattgtgtttcccagcctctccactcccccgccagaaaggagcctgagtgattctcttttcttcttgtttccctgattatgatgagcttccattgttctgttaagtcttgaagaggaatttaataaagcaaagaaactttttaaaaa

SEQ ID NO: 93 - DNA, 840 bp, Homo sapiens
  misc_feature: Incyte ID No: 965517CB1
  unsure 628, 650, 653, 676, 769, 779, 820: a, t, c, g, or other
aaaccttcacctctcatgctgaagctcacacccttgccctccaagatgaaggtttctgcagcgcttctgtgcctgctgctcatggcagccactttcagccctcagggacttgctcagccagattcagtttccattccaatcacctgctgctttaacgtgatcaataggaaaattcctatccagaggctggagagctacacaagaatcaccaacatccaatgtcccaaggaagctgtgatcttcaagaccaaacggggcaaggaggtctgtgctgaccccaaggagagatgggtcagggattccatgaagcatctggaccaaatatttcaaaatctgaagccatgagccttcatacatggactgagagtcagagcttgaagaaaagcttatttattttccccaacctcccccaggtgcagtgtgacattattttattataacatccacaaagagattatttttaaataatttaaagcataatatttcttaaaaagtatttaattatatttaagttgttgatgttttaactctatctgtcatacatcctagtgaatgtaaaatgcaaaatcctggtgatgtgttttttgtttttgttttcctgtgagctcaactaagttcacggccaaangtcattgttctccctcctaccngtncgtagtgttgtggggtcctcccntggatcatcaaggtgaaacacttaggtattctttggcaatcagtgctcctgtaagtcaaatgtgtgctttgtactgctgttgttgaaattgangttactgtanataactatggaattttgaaaaaaaatttcaaaaagaaaaanatatatataatttaaaacta

SEQ ID NO: 94 - DNA, 833 bp, Homo sapiens
  misc_feature: Incyte ID No: 1795309CB1
gtgccacgtgtggtctgtaagtaggtggtcagctgtagctggatgtgtgccttgaaaggctgacaagtttgccctgagtgactcacctactgtcacctgatccaacaagatttgtgggcgtacctgccgatgggtgacgccagttaaagcatctctgagggtccccaaggaacatggctgggagccgtgaggtggtggccatggactgcgagatggtggggctggggccccaccgggagagtggcctggctcgttgcagcctcgtgaacgtccacggtgctgtgctgtacgacaagttcatccggcctgagggagagatcaccgattacagaacccgggtcagcggggtcacccctcagcacatggtgggggccacaccatttgccgtggccaggctagagatcctgcagctcctgaaaggcaagctggtggtgggtcatgacctgaagcacgacttccaggcactgaaagaggacatgagcggctacacaatctacgacacgtccactgacaggctgttgtggcgtgaggccaagctggaccactgcaggcgtgtctccctgcgggtgctgagtgagcgcctcctgcacaagagcatccagaacagcctgcttggacacagctcggtggaagatgcgagggcaacgatggagctctatcaaatctcccagagaatccgagcccgccgagggctgccccgcctggctgtgtcagactgaagccccatccagcccgttccgcagggactagaggctttcggctttttgggacagcaactaccttgcttttggaaaatacatttttaatagtaaagtggctctatattttctcta

SEQ ID NO: 95 - DNA, 5238 bp, Homo sapiens
  misc_feature: Incyte ID No: 816792CB1
ctttgctgatttcaggagctactctcctcctggtgaggtggaaattccagcaagaatagaggtgaagacaagccaccaggactcaggagggaaacgctgaccattagaaacctctgcataagacgttgtaaggaggaaaataaaagagagaaaaacacaaagatttaaacaagaaacctacgaacccagctctggaaagagccaccttctccaaaatggatatgtttcctctcacctgggttttcttagccctctacttttcaagacaccaagtgagaggccaaccagacccaccgtgcggaggtcgtttgaattccaaagatgctggctatatcacctctcccggttacccccaggactacccctcccaccagaactgcgagtggattgtttacgcccccgaacccaaccagaagattgtcctcaacttcaaccctcactttgaaatcgagaagcacgactgcaagtatgactttatcgagattcgggatggggacagtgaatccgcagacctcctgggcaaacactgtgggaacatcgccccgcccaccatcatctcctcgggctccatgctctacatcaagttcacctccgactacgcccggcagggggcaggcttctctctgcgctacgagatcttcaagacaggctctgaagattgctcaaaaaacttcacaagccccaacgggaccatcgaatctcctgggtttcctgagaagtatccacacaacttggactgcacctttaccatcctggccaaacccaagatggagatcatcctgcagttcctgatctttgacctggagcatgaccctttgcaggtgggagagggggactgcaagtacgattggctggacatctgggatggcattccacatgttggccccctgattggcaagtactgtgggaccaaaacaccctctgaacttcgttcatcgacggggatcctctccctgacctttcacacggacatggcggtggccaaggatggcttctctgcgcgttactacctggtccaccaagagccactagagaactttcagtgcaatgttcctctgggcatggagtctggccggattgctaatgaacagatcagtgcctcatctacctactctgatgggaggtggacccctcaacaaagccggctccatggtgatgacaatggctggacccccaacttggattccaacaaggagtatctccaggtggacctgcgctttttaaccatgctcacggccatcgcaacacagggagcgatttccagggaaacacagaatggctactatgtcaaatcctacaagctggaagtcagcactaatggagaagactggatggtgtaccggcatggcaaaaaccacaaggtatttcaagccaacaacgatgcaactgaggtggttctgaacaagctccacgctccactgctgacaaggtttgttagaatccgccctcagacctggcactcaggtatcgccctccggctggagctcttcggctgccgggtcacagatgctccctgctccaacatgctggggatgctctcaggcctcattgcagactcccagatctccgcctcttccacccaggaatacctctggagccccagtgcagcccgcctggtcagcagccgctcgggctggttccctcgaatccctcaggcccagcccggtgaggagtggcttcaggtagatctgggaacacccaagacagtgaaaggtgtcatcatccagggagcccgcggaggagacagtatcactgctgtggaagccagagcatttgtgcgcaagttcaaagtctcctacagcctaaacggcaaggactgggaatacattcaggaccccaggacccagcagccaaagctgttcgaagggaacatgcactatgacacccctgacatccgaaggtttgaccccattccggcacagtatgtgcgggtatacccggagaggtggtcgccggcggggattgggatgcggctggaggtgctgggctgtgactggacagactccaagcccacggtagagacgctgggacccactgtgaagagcgaagagacaaccaccccctaccccaccgaagaggaggccacagagtgtggggagaactgcagctttgaggatgacaaagatttgcagctcccttcgggattcaattgcaacttcgatttcctcgaggagccctgtggttggatgtatgaccatgccaagtggctccggaccacctgggccagcagctccagcccaaacgaccggacgtttccagatgacaggaatttcttgcggctgcagagtgacagccagagagagggccagtatgcccggctcatcagcccccctgtccacctgccccgaagcccggtgtgcatggagttccagtaccaggccacgggcggccgcggggtggcgctgcaggtggtgcgggaagccagccaggagagcaagttgctgtgggtcatccgtgaggaccagggcggcgagtggaagcacgggcggatcatcctgcccagctacgacatggagtaccagattgtgttcgagggagtgatagggaaaggacgttccggagagattgccattgatgacattcggataagcactgatgtcccactggagaactgcatggaacccatctcggcttttgcagtggacatcccagaaatacatgagagagaaggatatgaagatgaaattgatgatgaatacgaggtggactggagcaattcttcttctgcaacctcagggtctggcgccccctcgaccgacaaagaaaagagctggctgtacaccctggatcccatcctcatcaccatcatcgccatgagctcactgggcgtcctcctgggggccacctgtgcaggcctcctgctctactgcacctgttcctactcgggcctgagctcccgaagctgcaccacactggagaactacaacttcgagctctacgatggccttaagcacaaggtcaagatgaaccaccaaaagtgctgctccgaggcatgacggattgcacctgaatcctatctgacgtttcattccagcaagaggggctggggaagattacatttttttttcctttggaaactgaatgccataatctcgatcaaaccgatccagaataccgaaggtatggacaggacagaaaagcgagtcgcaggaggaagggagatgcagccgcacaggggatgattaccctcctaggaccgcggtggctaagtcattgcaggaacggggctgtgttctctgctgggacaaaacaggagctcatctctttggggtcacagttctattttgtttgtgagtttgtattattattattattattattattattattatattttatttctttggtctgtgagcaactcaaagaggcagaagaggagaatgacttttccagaatagaagtggagcagtgatcattattctccgctttctctttctaatcaacacttgaaaagcaaagtgtcttttcagcctttccatctttacaaataaaactcaaaaaagccgtccagcttatcccatcctctgattgtcttctgacttaagggatttactgtggtgtaggttctgccagccaaccctacaagctgccatttccagtcctagcatttaagtaggatgttgttgcctttaacttttcttatccaggggaaaattgccattttagggtcagcatgaacagctctttcttgtatgcgatttaaaacaaactggaaaggaaacttcacacgtcaaaatccatagaagcgcctggacgaggcttaaagtgctttgtgagtgaataggagccattcgctaattctagacccacagtgtctggtggtggggcttcccttgtggggcttctggtggtggttttgccttttcttttccctcctccatgttcttctaaaacatatacatatatacatacacacatacacatattcttcaggtctctaagcccctggaagcagcattgtgtgatattctcagaggcaggggaaaatagagggaaaaatagagactattggtatgttctccccatcagcgagttattgtaactggtcaccactggacgggaaggagaacagaggagagggaaagagaagcccaacctctgtgatcatatgagggccaaggctgagcagtgtagacagagaccctttgaaatgcatttgtctctcaaatagactagtaaacaccgacttctcctttgggttacaaacaccatttcaacctttcgggagagtcagagctaggatgtacaagaactgattctaaccagaagtccgcaagtactgtggacaagaatgcttaaccatgctgcttcagccttgagagacctaggttcttacacatatgcacacacgcatacacacatgcacgcacacacacatacacacatgcacgcacgcacgcatgcacaccaatttatgtttttattaagtgccttgaaaaaaaaaaaaaaaatgtattttccctttatgtaaaaattagtgaatatcttatgaattaaggcattcctctttccctaaccccgatggctccattcccaagtaccccaactcactgctgatcctattaaaggaatgagtcctgctacccgagtggtagtcatagccctagatgactctcaactactcttcaaagggaggcatcaggaatagaatgaaactgtgtgaaggataagattgttcgcatcaagatccaaatcttgatttcatattaacgcctaaggattgcctgtgtgctggaaatatatttgaaactcaaccagtatgcccagcctattgcatatcattgtcagaccatttttgctgctgtggtcacccacgatttcatttgtcttatacccaggtgaaaggggaagggtgaatgggactggctggttcctttaaatgttaacttatggaaatgctagttcaaatggtaatgtcacagtgttttgtatgcagagagcaagagttcaaccaacagctgtttattcatgtgtgtgtgtctttgctgctttgagttctctgtatctactgtgtatgtgaatggtcatgtgggactcagtggtggtgttgtgactttgacctagggtccgagtgtcacagctgatcttggcactcggcactcattggcacagtggtaattagagggtaaaagttaagctgtcaagcccaaggcgttagccttagggctcccccctgagtcggcccacagttgtagcagatttaacatgtccctttctcttaacctccatagtgggagg

SEQ ID NO: 96 - DNA, 4344 bp, Homo sapiens
  misc_feature: Incyte ID No: 3838440CB1
gctcggggtccgcccgcgggctgccggtgcgagcgggcggcccggctcccctcctcccccgcccgccgccgccgctgtgattgggtggaagatggcgctggccggatggaaatcctaatgacagtctccaaattcgcctccatctgtaccatgggcgccaatgcttcggcattagagaaagagattggtccagaacagtttccggtcaatgagcactattttggattagtcaattttgggaatacctgctactgcaattcagttcttcaagcactttatttttgtcgtccatttcgggaaaaagttcttgcgtataagagtcaacctaggaaaaaggagagccttcttacatgcttagcagatctcttccatagcatagccactcagaagaaaaaggttggagtaataccccctaagaagttcatcacaagattacggaaagaaaatgagctttttgacaactacatgcaacaagatgcccatgaattcttaaattacctactaaatacaattgctgatattttacaagaagagagaaagcaggaaaaacaaaatggtcgtttacctaatggtaatattgataatgaaaataataacagcacaccagacccaacgtgggttcatgagatttttcagggaacattaactaatgaaaccagatgtcttacttgtgaaactataagcagcaaagatgaagattttttagacctttctgttgacgtggaacaaaatacatcaattactcactgcttaaggggtttcagcaacacagaaactctgtgcagtgaatacaagtattactgtgaagagtgtcgcagcaaacaggaagcacacaaacggatgaaagttaaaaaactgcccatgattctagctctacacctgaagagatttaaatatatggatcaacttcatcgatatacaaaactctcttaccgggtagtttttcctttagaacttcgtctgtttaacacttcaggtgatgccaccaatccagacagaatgtacgaccttgttgctgttgtggttcactgtggaagtggtcccaatcgaggccattatattgcaatagttaagagtcatgatttttggttgttgtttgatgacgacattgtagaaaaaatagatgcacaagctattgaagaattctacgggttgacatcagatatctcaaagaactctgagtctggttacatccttttctatcagtctcgggactgagagggaaccgtgatgaagagacactttctgcctcatttcttctctggttattttggaaaggatcaagcactgatttttcaagaaaagagaaatgcaggaagctcagggggcagtagcacactttgcacacgataaagcaaagacgatggattgacaagcccttccgatcatggtagttgatttatttgctcaggtatcatgctgtctgtacagttccatgacgaacaaggaggtgaaatcgagagataccagctcctcttttaaaacagccttccagtcattggcacgcattttctctttattaattgcaccaataatgctttgaattccttgggggtgcagtagaaagaatcggaatctgtgccgtattgataaggagatgatgttgaacacactgcataaatttgcctggttcagtatgtatagaagcatattcagtggtcttttcaagagtaaaccagaaatacttttgggcccaacacttgcagttgccttcctgatgtaaaaactaacatgctagataatccagtgtcgggaagacaaagatgttttgcttctctgaagaagcttataataatatacagtatatgtatatgtagggagcaattggtcaaaagtggctttttgtttccccaaggggaaagactggctttgtaattataattttttccttatttattttacttaaaactggtagagtctaagtattatatgaagtgcccatgattctgtcagtaaatttgaacatatttttattagttaatgtcagtttaagttgtccttttgtttgtttctatttttaaggtgaattttaatttctatctgaaatcagttaagataccttgagaaaaactgcagtgagaggagataaatatcctttttcaggaggaactgatatctctggctaaatatttgtccttttattatggtttctaaatcagttattttcttcagctttaatttcataaaattaaaaaactattttaaaaattcctgtagttgttggaataattaaaaattctggtgcagtggtggtataccaatctttagaattcttaagtattctaatgtttcaagttgagatcatgcttgggaaaatcatgtcatagcatttatgttattttcagatgccattttttaccctggaaagaagtcataatgttcatcataaccctagcagcctggatagtgagctaaacaaacccttcaaagattaaattttaatcaagtagaccgggaatacaaaagacaagtccttccttcccttccccccacctttacaaatcttactggaagggtgttcagaaattaaaatctgtgtttgctaagacttcattctgttgggggttttaagaagtaatatatgtaacataaaatatatgtaaacgattgcagtttttttggacgtttttccatgcatcagtaagttgtctgacagtagccaaatgtaacttgcagaaaattattgaaaattatattcagaataatagcaatcaggccttggatgttctttattaaactcttttcaggcagtaaatttaaaaaaaattgtcattttctaaagtccttttgctaaaactgttgactatggaaaacaacaaaaaggaattttttagtctgctgctattattaacatttattatctgtatcttttggctcaggaaatgacttcacctattttttccataagcagacctttaacagagtcacttaattgggctgcttaaacagatgttctgggagaaaattataatatttagtatttgtacaaaatatcaaaaagtattttgacaagtttctttttaagatagttcctaaagccttaccctggctagaggtgttttgtacaaattatatataagccagcctgatctaccaacatgccacagagaatcacaatcaacagtgtggggaaagtcagggcagtggaagtggatgcactctttttattttgaaggcttaaaccaaattgtcttggaattaaagctgtatttctgcagctttcggtacagagaaaaagaggaaagtgaagctgtgtcagttttaacattagctatatcaacatgtttaagaaagatagatgaagtcatttgcataaaggtacagcattgaaatactatgttgtgtttgtttttacatttttgcattaaaaaaaaacatgccgtaaaagccaagttaaatttcatattaaagcaagttctagtgtatgtgttgagttcctggtaatcacatacttgttcacatctacaccgtacttcatagtatgatttgtcaggggagggattgtggggtgacagttttacatttactttttcttcttaatgcagctggatctaagtaaaatgttttgaagtttatcagaaactaaatgtacttttaaaacgtatagggtcagggttgggggaaaaatacaggtatagtaagtaagaaaagtgacccatgaagaaagcatcgtgaggttgtatgttggttgactgtgattaaaatgcggggctggtgtaagttgtaagtggtggctgattgccgtgtaactatgtacatgattgttgggatggctgtcccatattttgtatattggaataaaaatttctataaattattgtaactaaaagtaaatattctaaattaagtcccacttcttaagtcacatggcttctgtcttggaaattttacctttaaaagattatttaagacaggaaccaggaggcttgggaacagggaaagagggaaatgttgtattatgtgggtcttggggcctctaaccatcagtatagggttttttctttccttgatggcagtagaaagacctcattttcataacataactactcttgatactttctttaaaaacactttttattaaagattctatcatgaggtatttggctgggagctgggaggctaaagcgctcatgtcctggctcttcagtgaatttaactgtgtgaccttgggcaagtcacttaacctctctgtgcttcagtctccctgtcttgtaaaatgggagtaatacctacctcacagggttgttgtggggattaattagagataatgtctgtaaagcatttaaggttcttgaagaaggcactatataaatacaaaataatatctattaaagttggtttatt

SEQ ID NO: 97 - DNA, 2177 bp, Homo sapiens
  misc_feature: Incyte ID No: 3282941CB1
cctactttctctagaccagaaaattcccaaaattgtgcacattagaatcacgtgggtagcccacaaaattcccagtgccaaattataacctgcctttcctgtggcccagtggtttccaacgacattgggccctcggtctgagaagtgcctataatactggcttacatggccctcaggctgaaccttggacgtggcaggtattgcaaatattttccgcggtgcgcgcggattctggacttgggcgccaactcgtagtccacgctccccggggtcagcagaggggcgtcacgctctcgccacccacctcgctttctcaccccgcgcttcccggcctgggtttttagtcttccttggagcgctctctggcctccgcctccgccagggagcggaaggcggagacagcgagactggccaggggggaggaaagaggacgcgtgtgggcaagggggacaacgggatgtccacgggctcggtgagtgatccggaggagatggagcttcgggggctgcagcgggagtacccggtccccgcctccaagaggccgcccctccgcggcgtagagcgcagctacgcctcgcccagtgacaactcgtcggcagaggaggaggaccccgacggcgaggaggagcgctgcgctctgggcacagccggcagcgcggaaggctgcaagaggaagcggccccgtgtggctgggggcggcggcgcaggtggtagcgcgggcggtggtggcaagaagcccctcccggccaagggctcagccgcagagtgcaagcagtcgcagcggaacgcggccaacgcccgtgagcgtgcccggatgcgcgtgctgagcaaagccttctccaggctcaagaccagcctgccctgggtgccccccgacactaagctctccaagctggacacgctccggctggcttccagttacatcgctcacctgcggcagctgttgcaggaggaccgctatgagaacggctacgtgcacccagtgaacctgacatggccattcgtggtctcgggaagaccggactctgacaccaaagaagtttccgcagccaacagactatgtggaaccaccgcttaaatcggactggaactcacttgatgggattattcgttaaatgcgagtgtttgggggccacggagagaagggagagctcgtgagatgggaagaagtttccgctggattctccttgacccttcccctttccctggaactgtgatcgtgacaggtggcgggtgtggctgtcactgcacagcgcccacggctacagctgcgccggatctgggcgaccacgttttgcctctccaaaaagagcttcctttcgtgacgagacgcggacgcaggtccaccctcgggccctagctctgtagactaactctcggctgctgccccagcccgcgccagacagcccacggatccgttctcagcggacgcagattcatcgcacacgtgcgggacggttccacacagccccggcctttcgcggtgacacaatggttagggaacggttagaacgcgctctacatccgctttaaagacagaggtctagacgtgagatccgcgtcgggacagggttttaagtgacaaagaagggcgagtggcttctctgggccgggttcgtactccagcacagcgcccttctaacgggcgggaggaaggccgctgctcgcagggctaggtggagacacacttcccagatcaccgcaggcgggttttacccggagagctctgggccgttcggcctccctgccgggtggcttcttcaatcccgtctccttcccaagctcccggctttttctaatcaggcaggcgtctgtcaaccctctccacttctgggctgaagcctccccaagccccgctgcgccaacctgtgtggggtcttcttcgggcctccctctccgccccgctcctgctcctacctgcagcacccccagctccgactccagactctctgcatcaggtctccccactccacgctccgggcgccccaactccaacaccacgtcctgccgcgcaggttcttccccgcgcggaggagcgcgcagggtgggcggcttaccatagcaagtgatcctgcgatagggaacgcgcccttgccccgaggctgcactaccacaggaaataacatatgtaaataaatttatttttttatgaataataaaacgcgctgtaaaaaccg

SEQ ID NO: 98 - DNA, 7231 bp, Homo sapiens
  misc_feature: Incyte ID No: 1399366.28
  unsure 5584-5623: a, t, c, g, or other
cgcccgagctggcctgcgagttcagggctcctgtcgctctccaggagcaacctctactccggacgcacaggcattccccgcgcccctccagccctcgccgccctcgccaccgctcccggccgccgcgctccggtacacacaggatccctgctgggcaccaacagctccaccatggggctggcctggggactaggcgtcctgttcctgatgcatgtgtgtggcaccaaccgcattccagagtctggcggagacaacagcgtgtttgacatctttgaactcaccggggccgcccgcaaggggtctgggcgccgactggtgaagggccccgacccttccagcccagctttccgcatcgaggatgccaacctgatcccccctgtgcctgatgacaagttccaagacctggtggatgctgtgcgggcagaaaagggtttcctccttctggcatccctgaggcagatgaagaagacccggggcacgctgctggccctggagcggaaagaccactctggccaggtcttcagcgtggtgtccaatggcaaggcgggcaccctggacctcagcctgaccgtccaaggaaagcagcacgtggtgtctgtggaagaagctctcctggcaaccggccagtggaagagcatcaccctgtttgtgcaggaagacagggcccagctgtacatcgactgtgaaaagatggagaatgctgagttggacgtccccatccaaagcgtcttcaccagagacctggccagcatcgccagactccgcatcgcaaaggggggcgtcaatgacaatttccagggggtgctgcagaatgtgaggtttgtctttggaaccacaccagaagacatcctcaggaacaaaggctgctccagctctaccagtgtcctcctcacccttgacaacaacgtggtgaatggttccagccctgccatccgcactaactacattggccacaagacaaaggacttgcaagccatctgcggcatctcctgtgatgagctgtccagcatggtcctggaactcaggggcctgcgcaccattgtgaccacgctgcaggacagcatccgcaaagtgactgaagagaacaaagagttggccaatgagctgaggcggcctcccctatgctatcacaacggagttcagtacagaaataacgaggaatggactgttgatagctgcactgagtgtcactgtcagaactcagttaccatctgcaaaaaggtgtcctgccccatcatgccctgctccaatgccacagttcctgatggagaatgctgtcctcgctgttggcccagcgactctgcggacgatggctggtctccatggtccgagtggacctcctgttctacgagctgtggcaatggaattcagcagcgcggccgctcctgcgatagcctcaacaaccgatgtgagggctcctcggtccagacacggacctgccacattcaggagtgtgacaagagatttaaacaggatggtggctggagccactggtccccgtggtcatcttgttctgtgacatgtggtgatggtgtgatcacaaggatccggctctgcaactctcccagcccccagatgaacgggaaaccctgtgaaggcgaagcgcgggagaccaaagcctgcaagaaagacgcctgccccatcaatggaggctggggtccttggtcaccatgggacatctgttctgtcacctgtggaggaggggtacagaaacgtagtcgtctctgcaacaaccccacaccccagtttggaggcaaggactgcgttggtgatgtaacagaaaaccagatctgcaacaagcaggactgtccaattgatggatgcctgtccaatccctgctttgccggcgtgaagtgtactagctaccctgatggcagctggaaatgtggtgcttgtccccctggttacagtggaaatggcatccagtgcacagatgttgatgagtgcaaagaagtgcctgatgcctgcttcaaccacaatggagagcaccggtgtgagaacacggaccccggctacaactgcctgccctgccccccacgcttcaccggctcacagcccttcggccagggtgtcgaacatgccacggccaacaaacaggtgtgcaagccccgtaacccctgcacggatgggacccacgactgcaacaagaacgccaagtgcaactacctgggccactatagcgaccccatgtaccgctgcgagtgcaagcctggctacgctggcaatggcatcatctgcggggaggacacagacctggatggctggcccaatgagaacctggtgtgcgtggccaatgcgacttaccactgcaaaaaggataattgccccaaccttcccaactcagggcaggaagactatgacaaggatggaattggtgatgcctgtgatgatgacgatgacaatgataaaattccagatgacagggacaactgtccattccattacaacccagctcagtatgactatgacagagatgatgtgggagaccgctgtgacaactgtccctacaaccacaacccagatcaggcagacacagacaacaatggggaaggagacgcctgtgctgcagacattgatggagacggtatcctcaatgaacgggacaactgccagtacgtctacaatgtggaccagagagacactgatatggatggggttggagatcagtgtgacaattgccccttggaacacaatccggatcagctggactctgactcagaccgcattggagatacctgtgacaacaatcaggatattgatgaagatggccaccagaacaatctggacaactgtccctatgtgcccaatgccaaccaggctgaccatgacaaagatggcaagggagatgcctgtgaccacgatgatgacaacgatggcattcctgatgacaaggacaactgcagactcgtgcccaatcccgaccagaaggactctgacggcgatggtcgaggtgatgcctgcaaagatgattttgaccatgacagtgtgccagacatcgatgacatctgtcctgagaatgttgacatcagtgagaccgatttccgccgattccagatgattcctctggaccccaaagggacatcccaaaatgaccctaactgggttgtacgccatcagggtaaagaactcgtccagactgtcaactgtgatcctggactcgctgtaggttatgatgagtttaatgctgtggacttcagtggcaccttcttcatcaacaccgaaagggacgatgactatgctggatttgtctttggctaccagtccagcagccgcttttatgttgtgatgtggaagcaagtcacccagtcctactgggacaccaaccccacgagggctcagggatactcgggcctttctgtgaaagttgtaaactccaccacagggcctggcgagcacctgcggaacgccctgtggcacacaggaaacacccctggccaggtgcgcaccctgtggcatgaccctcgtcacataggctggaaagatttcaccgcctacagatggcgtctcagccacaggccaaagacgggtttcattagagtggtgatgtatgaagggaagaaaatcatggctgactcaggacccatctatgataaaacctatgctggtggtagactagggttgtttgtcttctctcaagaaatggtgttcttctctgacctgaaatacgaatgtagagatccctaatcatcaaattgttgattgaaagactgatcataaaccaatgctggtattgcaccttctggaactatgggcttgagaaaacccccaggatcacttctccttggcttccttcttttctgtgcttgcatcagtgtggactcctagaacgtgcgacctgcctcaagaaaatgcagttttcaaaaacagactcagcattcagcctccaatgaataagacatcttccaagcatataaacaattgctttggtttccttttgaaaaagcatctacttgcttcagttgggaaggtgcccattccactctgcctttgtcacagagcagggtgctattgtgaggccatctctgagcagtggactcaaaagcattttcaggcatgtcagagaagggaggactcactagaattagcaaacaaaaccaccctgacatcctccttcaggaacacggggagcagaggccaaagcactaaggggagggcgcatacccgagacgattgtatgaagaaaatatggaggaactgttacatgttcggtactaagtcattttcaggggattgaaagactattgctggatttcatgatgctgactggcgttagctgattaacccatgtaaataggcacttaaatagaagcaggaaagggagacaaagactggcttctggacttcctccctgatccccacccttactcatcacctgcagtggccagaattagggaatcagaatcaaaccagtgtaaggcagtgctggctgccattgcctggtcacattgaaattggtggcttcattctagatgtagcttgtgcagatgtagcaggaaaataggaaaacctaccatctcagtgagcaccagctgcctcccaaaggaggggcagccgtgcttatatttttatggttacaatggcacaaaattattatcaacctaactaaaacattccttttctcttttttcctgaattatcatggagttttctaattctctcttttggaatgtagattttttttaaatgctttacgatgtaaaatatttattttttacttattctggaagatctggctgaaggattattcatggaacaggaagaagcgtaaagactatccatgtcatctttgttgagagtcttcgtgactgtaagattgtaaatacagattatttattaactctgttctgcctggaaatttaggcttcatacggaaagtgtttgagagcaagtagttgacatttatcagcaaatctcttgcaagaacagcacaaggaaaatcagtctaataagctgctctgccccttgtgctcagagtggatgttatgggattctttttttctctgttttatcttttcaagtggaattagttggttatccatttgcaaatgttttaaattgcaaagaaagccatgaggtcttcaatactgttttaccccatcccttgtgcatatttccagggagaaggaaagcatatacacttttttctttcatttttccaaaagagaaaaaaatgacaaaaggtgaaacttacatacaaatattacctcatttgttgtgtgactgagtaaagaatttttggatcaagcggaaagagtttaagtgtctaacaaacttaaagctactgtagtacctaaaaagtcagtgttgtacatagcataaaaactctgcagagaagtattcccaataaggaaatagcattgaaatgttaaatacaatttctgaaagttatgtttttttttctatcatctggtataccattgctttatttttataaattattttctcattgccattggaatagatatctcagattgtgtagatatgctatttaaataatttatcaggaaatactgcctgtagagttagtatttctatttttatataatgtttgcacactgaattgaagaattgttggttttttctnnnnnnnnnnnnnnnnnnnnnnnnnnnnnnnnnnnnnnnngacctcccatttttactatttgccaatacctttttctaggaatgtgcttttttttgtacacatttttatccattttacattctaaagcagtgtaagttgtatattactgtttcttatgtacaaggaacaacaataaatcatatggaaatttatatttatacttactgtatccatgcttatttgttctctactggctttatgtcatgaagtatatgcgtaaataccattcataaatcaatatagcatatacaaaaataaattacagtaagtcatagcaacattcacagtttgtatgtgattgagaaagactgagttgctcaggcctaggcttagaatttgctgcgtttgtggaataaaagaacaaaatgatacattagcctgccatatcaaaaacatataaaagagaaattatccctaagtcaagggcccccataagaataaaatttcttattaaggtcattagatgtcattgaatccttttcaaagtgcagtatgaaaacaaagggaaaaacactgaagcacacgcaactctcacagcgacattttctgacccacgaatgatgccttgggtgggcaacacgattgcatgttgtggagacacttcggaagtaaatgtggatgagggaggagctgtccttgcaatgttgagccaagcattacagatacctcctcttgaagaaggaataataagtttaatcaaaaaagaagactaaaaaatgtaaaatttggaaggaatccataaatgcgtgtgtgtctaaatacaaattatcatgtgaagaaaaggcccaagtgtaccaataagcagaccttgatttttggatgggctaattatgaatgtggaatactgaccagttaatttccagttttaatgaaaacagatcaaagaagaaattttatgagtaggttaaaggtctggctttgaggtctattaaacactagaaaggactggctgggtgagataaaatcttccttgttgattttcactctcattctataaatactcatctttctgagtagccatgatcacatacaaatgtaaattgccaaatcattttatagtaccaaggtgaagaagcaggaactagaaagtgttgataatagctgtggagttaggaaaactgatgtgaaggaaataattctttgaaatggcaaagaattaaataccatcattcattatcagaagagttcaacgtttgaagtgctgggagataattctaattcattcttggatagtgaagcaaaactgattgaaaataccaagataagacagaaaaagtgactggaaagaggagcttttcttccaggcatgttccagtttcaccctaagactgaccttcaaataatcaggttgtactgaaataaaggacttgttaaaaattaaaattatgtcatcgagatgatagcttttttcctcctccaacagtttattgtcatgtgttgtgggagagctcgagtgaagagcaataaactccaggtcttataagaatgtacatacaataaaggtggtgccagcagtttttttttttctaaagagtcacatgtagaaaagcctccagtattaagctcctgaattcattccttaaataaattggctctctctctcttcaa

SEQ ID NO: 99 - DNA, 3261 bp, Homo sapiens
  misc_feature: Incyte ID No: 269059.41
ggggacacacaacaactcttccccgctgagaggagacagccagtgcgactccaccctccagctcgacggcagccgccccggccgacagccccgagacgacagcccggcgcgtcccggtccccacctccgaccaccgccagcgctccaggccccgccgctccccgctcgccgccaccgcgccctccgctccgcccgcagtgccaaccatgaccgccgccagtatgggccccgtccgcgtcgccttcgtggtcctcctcgccctctgcagccggccggccgtcggccagaactgcagcgggccgtgccggtgcccggacgagccggcgccgcgctgcccggcgggcgtgagcctcgtgctggacggctgcggctgctgccgcgtctgcgccaagcagctgggcgagctgtgcaccgagcgcgacccctgcgacccgcacaagggcctcttctgtgacttcggctccccggccaaccgcaagatcggcgtgtgcaccgccaaagatggtgctccctgcatcttcggtggtacggtgtaccgcagcggagagtccttccagagcagctgcaagtaccagtgcacgtgcctggacggggcggtgggctgcatgcccctgtgcagcatggacgttcgtctgcccagccctgactgccccttcccgaggagggtcaagctgcacgggaaatgctgcgaggagtgggtgtgtgacgagcccaaggaccaaaccgtggttgggcctgccctcgcggcttaccgactggaagacacgtttggcccagacccaactatgattagagccaactgcctggtccagaccacagagtggagcgcctgttccaagacctgtgggatgggcatctccacccgggttaccaatgacaacgcctcctgcaggctagagaagcagagccgcctgtgcatggtcaggccttgcgaagctgacctggaagagaacattaagaagggcaaaaagtgcatccgtactcccaaaatctccaagcctatcaagtttgagctttctggctgcaccagcatgaagacataccgagctaaattctgtggagtatgtaccgacggccgatgctgcaccccccacagaaccaccaccctgccggtggagttcaagtgccctgacggcgaggtcatgaagaagaacatgatgttcatcaagacctgtgcctgccattacaactgtcccggagacaatgacatctttgaatcgctgtactacaggaagatgtacggagacatggcatgaagccagagagtgagagacattaactcattagactggaacttgaactgattcacatctcatttttccgtaaaaatgatttcagtagcacaagttatttaaatctgtttttctaactgggggaaaagattcccacccaattcaaaacattgtgccatgtcaaacaaatagtctatcaaccccagacactggtttgaagaatgttaagacttgacagtggaactacattagtacacagcaccagaatgtatattaaggtgtggctttaggagcagtgggagggtaccagcagaaaggttagtatcatcagatagcatcttatacgagtaatatgcctgctatttgaagtgtaattgagaaggaaaattttagcgtgctcactgacctgcctgtagccccagtgacagctaggatgtgcattctccagccatcaagagactgagtcaagttgttccttaagtcagaacagcagactcagctctgacattctgattcgaatgacactgttcaggaatcggaatcctgtcgattagactggacagcttgtggcaagtgaatttgcctgtaacaagccagattttttaaaatttatattgtaaatattgtgtgtgtgtgtgtgtgtgtatatatatatatatgtacagttatctaagttaatttaaagttgtttgtgcctttttatttttgtttttaatgctttgatatttcaatgttagcctcaatttctgaacaccataggtagaatgtaaagcttgtctgatcgttcaaagcatgaaatggatacttatatggaaattctgctcagatagaatgacagtccgtcaaaacagattgtttgcaaaggggaggcatcagtgtccttggcaggctgatttctaggtaggaaatgtggtagcctcacttttaatgaacaaatggcctttattaaaaactgagtgactctatatagctgatcagttttttcacctggaagcatttgtttctactttgatatgactgtttttcggacagtttatttgttgagagtgtgaccaaaagttacatgtttgcacctttctagttgaaaataaagtgtatattttttctctcatttctcccagaattaaagatatactttagtgatctgcgtgataatatttataggtttatttacctatatttaaaaatgatcagtggctagacatgtctagaaatatatatggcctaatatgtaacttctctttgataaagtgaaaacaagtaatatataagctaatattattgaagcaatattttttggtacatacttacttattttattgttttcgatctgcatgcacaatatgaaatcataaaagcaacaaacatcaccacaccaacactgagtaagatcatttctatcaggccaaggaggtttatttttccagttacttgacttctgaacatgtttgccttctcatcaccaatggtcccagtctgtaatcaagttaataatcaacattatttgggtacgttagtaaaacaaaataaacccttcaattgcctatcacccttttttctaacacctctattggtgttagtcatcagtatctataaggcaagttaatggaattccttttgcaagtcaagaaaggcaattaagtgccagatagagtacggtactcttcaatgtactaggattcatttgctcttcagaactatcaaagggtcaacagtttcatttgctccaaagacttattcaatgtttttcctatttttatagctatcaatgcatggatttatagtaaaaataccttgtcaggcaatagaagacaaatgttacaacaagaaaatgtgtttaatagatgcatttttgaagaaaatcttaaatgataggaaatgtttttgttcaattggatcatctcaaataggttaaataaatgtatactcatccatatgggtaatggaaatacatatagctttaaatactatacattcttttgaaacatcaagagcttgtttatatacaaagaaggttgtttttaatgac

SEQ ID NO: 100 - DNA, 2340 bp, Homo sapiens
  misc_feature: Incyte ID No: 5511889CB1
cgccctttttttttttccccagggagtgggggctggcccttactgctttataagcaccagctcaagaaggaacctacagcctcttggaaaggaatctcactaggggcttgactgcgtgggtctgtagcgctttcactgtaagaaagcaagatgcattttagaaactttaactacagttttagctccctgattgcctgtgtggcaaacagtgatatcttcagcgaaagtgaaaccagggccaaatttgagtccctctttaggacgtatgacaaggacatcacctttcagtattttaagagcttcaaacgagtcagaataaacttcagcaaccccttctccgcagcagatgccaggctccagctgcataagactgagtttctgggaaaggaaatgaagttatattttgctcagaccttacacataggaagctcacacctggctccgccaaatccagacaagcagtttctgatctcccctcccgcctctccgccagtgggatggaaacaagtggaagatgcgaccccagtcataaactatgatctcttatatgccatctccaagctggggccaggggaaaagtatgaattgcacgcagcgactgacaccactcccagcgtggtggtccatgtatgtgagagtgatcaagagaaggaggaagaagaggaaatggaaagaatgaggagacctaagccaaaaattatccagaccaggaggccggagtacacgccgatccacctcagctgaactggcacgcgacgaggacgcattccaaatcatactcacgggaggaatcttttactgtggaggtggctggtcacgacttcttcggaggtggcagccgagatcggggtggcagaaatcccagttcatgttgctcagaagagaatcaaggccgtgtccccttgttctaatgctgcacaccagttactgttcatggcacccgggaatgacttgggccaatcactgagtttgtggtgatcgcacaaggacatttgggactgtcttgagaaaacagataatgatagtgttttgtacttgttcttttctggtaggttctgtctgtgccaagggcaggttgatcagtgagctcaggagagagcttcctgtttctaagtggcctgcaggggccactctctactggtaggaagaggtaccacaggaagccgcctagtgcagagaggttgtgaaaacagcagcaatgcaatgtggaaattgtagcgtttcctttcttccctcatgttctcatgtttgtgcatgtatattactgatttacaagactaacctttgttcgtatataaagttacaccgttgttgttttacatcttttgggaagccaggaaagcgtttggaaaacgtatcacctttcccagattctcggattctcgactctttgcaacagcacttgcttgcggaactcttcctggaatgcattcactcagcatccccaaccgtgcaacgtgtaacttgtgcttttgcaaaagaagttgatctgaaattcctctgtagaatttagcttatacaattcagagaatagcagtttcactgccaacttttagtgggtgagaaattttagtttaggtgtttgggatcggacctcagtttctgttgtttcttttatgtggtggtttctatacatgaatcatagccaaaaacttttttggaaactgttggttgagatagttggttcttttaccccacgaagacatcaagatacacttgtaaataaagctgatagcatatattcatacctgttgtacacttgggtgaaaagtatggcagtgggagactaagatgtattaacctacctgtgaatcatatgttgtaggaaaagctgttcccatgtctaacaggacttgaattcaaagcatgtcaagtggatagtagatctgtggcgatatgagagggatgcagtgcctttccccattcattcctgatggaattgttatactaggttaacatttgtaatttttttctagttgtaatgtgtatgtctggtaaataggtattatattttggccttacaataccgtaacaatgtttgtcattttgaaatacttaatgccaagtaacaatgcatgctttggaaatttggaagatggttttattctttgagaagcaaatatgtttgcattaaatgctttgattgttcatatcaagaaattgattgaacgttctcaaaccctgtttacggtacttggtaagagggagccggtttgggagagaccattgcatcgctgtccaagtgtttcttgttaagtgcttttaaactggagaggctaacctcaaaatattttttttaactgcattctataataaatgggcacagtatgctccttacag

SEQ ID NO: 101 - DNA, 3436 bp, Homo sapiens
  misc_feature: Incyte ID No: 1671522CB1
tggcggccagggccagtccgcccggcggctcgcgcacggctccgcggtccttttgcctgtccagccggccgcctgtccctgctccctccctccgtgaggtgtccgggttcccttcgcccagctctcccacccctacccgaccccggcgcccgggctcccagagggaactgcacttcggcagagttgaatgaatgaagagagacgcggagaactcctaaggaggagattggacaggctggactccccattgcttttctaaaaatcttggaaactttgtccttcattgaattacgacactgtccacctttaatttcctcgaaaacgcctgtaactcggctgaagccatgccttgtgttcaggcgcagtatgggtcctcgcctcaaggagccagccccgcttctcagagctacagttaccactcttcgggagaatacagctccgatttcttaactccagagtttgtcaagtttagcatggacctcaccaacactgaaatcactgccaccacttctctccccagcttcagtacctttatggacaactacagcacaggctacgacgtcaagccaccttgcttgtaccaaatgcccctgtccggacagcagtcctccattaaggtagaagacattcagatgcacaactaccagcaacacagccacctgcccccccagtctgaggagatgatgccgcactccgggtcggtttactacaagccctcctcgcccccgacgcccaccaccccgggcttccaggtgcagcacagccccatgtgggacgacccgggatctctccacaacttccaccagaactacgtggccactacgcacatgatcgagcagaggaaaacgccagtctcccgcctctccctcttctcctttaagcaatcgccccctggcaccccggtgtctagttgccagatgcgcttcgacgggcccctgcacgtccccatgaacccggagcccgccggcagccaccacgtggtggacgggcagaccttcgctgtgcccaaccccattcgcaagcccgcgtccatgggcttcccgggcctgcagatcggccacgcgtctcagctgctcgacacgcaggtgccctcaccgccgtcgcggggctccccctccaacgaggggctgtgcgctgtgtgtggggacaacgcggcctgccaacactacggcgtgcgcacctgtgagggctgcaaaggcttctttaagcgcacagtgcaaaaaaatgcaaaatacgtgtgtttagcaaataaaaactgcccagtggacaagcgtcgccggaatcgctgtcagtactgccgatttcagaagtgcctggctgttgggatggtcaaagaagtggttcgcacagacagtttaaaaggccggagaggtcgtttgccctcgaaaccgaagagcccacaggagccctctcccccttcgcccccggtgagtctgatcagtgccctcgtcagggcccatgtcgactccaacccggctatgaccagcctggactattccaggttccaggcgaaccctgactatcaaatgagtggagatgacacccagcatatccagcaattctatgatctcctgactggctccatggagatcatccggggctgggcagagaagatccctggcttcgcagacctgcccaaagccgaccaagacctgctttttgaatcagctttcttagaactgtttgtccttcgattagcatacaggtccaacccagtggagggtaaactcatcttttgcaatggggtggtcttgcacaggttgcaatgcgttcgtggctttggggaatggattgattccattgttgaattctcctccaacttgcagaatatgaacatcgacatttctgccttctcctgcattgctgccctggctatggtcacagagagacacgggctcaaggaacccaagagagtggaagaactgcaaaacaagattgtaaattgtctcaaagaccacgtgactttcaacaatggggggttgaaccgccccaattatttgtccaaactgttggggaagctcccagaacttcgtaccctttgcacacaggggctacagcgcattttctacctgaaattggaagacttggtgccaccgccagcaataattgacaaacttttcctggacactttacctttctaagacctcctcccaagcacttcaaaggaactggaatgataatggaaactgtcaagagggggcaagtcacatgggcagagatagccgtgtgagcagtctcagctcaagctgccccccatttctgtaaccctcctagcccccttgatccctaaagaaaacaaacaaacaaacaaaaactgttgctatttcctaacctgcaggcagaacctgaaagggcattttggctccggggcatcctggatttagaacatggactacacacaatacagtggtataaactttttattctcagtttaaaaatcagtttgttgttcagaagaaagattgctataaggtataatgggaaatgtttggccatgcttggttgttgcagttcagacaaatgtaacacacacacacatacacacacacacacacacagagacacatcttaaggggacccacaagtattgccctttaacaagacttcaaagttttctgctgtaaagaaagctgtaatatatagtaaaactaaatgttgcgtgggtggcatgagttgaagaaggcaaaggcttgtaaatttacccaatgcagtttggctttttaaattattttgtgcctatttatgaataaatattacaaattctaaaagataagtgtgtttgcaaaaaaaaagaaaataaatacataaaaaagggacaagcatgttgattctaggttgaaaatgttataggcacttgctacttcagtaatgtctatattatataaatagtatttcagacactatgtagtctgttagattttataaagattggtagttatctgagcttaaacattttctcaattgtaaaataggtgggcacaagtattacacatcagaaaatcctgacaaaagggacacatagtgtttgtaacaccgtccaacattccttgtttgtaagtgttgtatgtaccgttgatgttgataaaaagaaagtttatatcttgattattttgttgtctaaagctaaacaaaacttgcatgcagcagcttttgactgtttccagagtgcttataatatacataactccctggaaataactgagcactttgaattttttttatgtctaaaattgtcagttaatttattattttgtttgagtaagaattttaatattgccatattctgtagtatttttctttgtatatttctagtatggcacatgatatgagtcactgcctttttttctatggtgtatgacagttagagatgctgattttttttctgataaattctttctttgagaaagacaattttaatgtttacaacaataaacca

SEQ ID NO: 102 - DNA, 1282 bp, Homo sapiens
  misc_feature: Incyte ID No: 1447015.4
cacgactcactatagggaatttggccctcgaggcaagaattcggcacgaggtcgacaccctcatcctgaaaggtattgcgcagcgatgcacggccatcaagtaccacttttctcagcccatccgcttgcgaaacattccttttaatttaaccaagaccatacagcaagatgagtggcacctgcttcatttaagaagaatcactgctggcttcctcggcatggccgtagccgtccttctctgcggctgcattgtggccacagtcagtttcttctgggaggagagcttgacccagcacgtggctggactcctgttcctcatgacagggatattttgcaccatttccctctgtacttatgccgccagtatctcgtatgatttgaaccggctcccaaagctaatttatagcctgcctgctgatgtggaacatggttacagctggtccatcttttgcgcctggtgcagtttaggctttattgtggcagctggaggtctctgcatcgcttatccgtttattagccggaccaagattgcacagctaaagtctggcagagactccacggtatgactgtcctcactgggcctgtccacagtgcgagcgactcctgaggggaacagcgcggagttcaggagtccaagcacaaagcggtcttttacattccaacctgttgcctgccagccctttctggattactgatagaaaatcatgcaaaacctcccaacctttctaaggacaagactactgtggattcaagtgctttaatgactatttatgcgttgactgtgagaatagggagcagtgccatgggacatttctaggtgtagagaaagaagaaactgcaatggaaaaatttgtatgatttccatttatttcagaaagtttgtatgtaacaattacccgagagtcatttctacttgcaaaaggattcgtaacaaagcgagtataattttcttgtcattgtatcatgcttgttaaattttaatgcagcatcttcagaacttgtcctgatggtgtcttattgtgtcagcaccaaatatttgtgcattatttgtggacgttccttgtcacaggaagattcttcttctgttgccttattgtttttttttttttaagtctcttctctgtctttgtactggaatcgaaatcataagataaacagatcaaacgtgcttaagagctaactcgtgacactatgcagtattgtttgaagacctgttgttcaacctctgtctctttatgttaactggatttctgcattaaatgactgcccccttgttaatctg

SEQ ID NO: 103 - DNA, 2516 bp, Homo sapiens
  misc_feature: Incyte ID No: 1306684.34
ggggagtcccagtggcggaggctacgaaacttgggggagtgcacagaagaacttcgggagcgcacgcgggaccagggaccaggctgagactcggggcgccagtccgggcaggggcagcgggagccggccggagatgccctgtatccaagcccaatatgggacaccagcaccgagtccgggaccccgtgaccacctggcaagcgaccccctgacccctgagttcatcaagcccaccatggacctggccagccccgaggcagcccccgctgcccccactgccctgcccagcttcagcaccttcatggacggctacacaggagagtttgacaccttcctctaccagctgccaggaacagtccagccatgctcctcagcctcctcctcggcctcctccacatcctcgtcctcagccacctcccctgcctctgcctccttcaagttcgaggacttccaggtgtacggctgctaccccggccccctgagcggcccagtggatgaggccctgtcctccagtggctctgactactatggcagcccctgctcggccccgtcgccctccacgcccagcttccagccgccccagctctctccctgggatggctccttcggccacttctcgcccagccagacttacgaaggcctgcgggcatggacagagcagctgcccaaagcctctgggcccccacagcctccagccttcttttccttcagtcctcccaccggccccagccccagcctggcccagagccccctgaagttgttcccctcacaggccacccaccagctgggggagggagagagctattccatgcctacggccttcccaggtttggcacccacttctccacaccttgagggctcggggatactggatacacccgtgacctcaaccaaggcccggagcggggccccaggtggaagtgaaggccgctgtgctgtgtgtggggacaacgcttcatgccagcattatggtgtccgcacatgtgagggctgcaagggcttcttcaagcgcacagtgcagaaaaacgccaagtacatctgcctggctaacaaggactgccctgtggacaagaggcggcgaaaccgctgccagttctgccgcttccagaagtgcctggcggtgggcatggtgaaggaagttgtccgaacagacagcctgaaggggcggcggggccggctaccttcaaaacccaagcagcccccagatgcctcccctgccaatctcctcacttccctggtccgtgcacacctggactcagggcccagcactgccaaactggactactccaagttccaggagctggtgctgccccactttgggaaggaagatgctggggatgtacagcagttctacgacctgctctccggttctctggaggtcatccgcaagtgggcggagaagatccctggctttgctgagctgtcaccggctgaccaggacctgttgctggagtcggccttcctggagctcttcatcctccgcctggcgtacaggtctaagccaggcgagggcaagctcatcttctgctcaggcctggtgctacaccggctgcagtgtgcccgtggcttcggggactggattgacagtatcctggccttctcaaggtccctgcacagcttgcttgtcgatgtccctgccttcgcctgcctctctgcccttgtcctcatcaccgaccggcatgggctgcaggagccgcggcgggtggaggagctgcagaaccgcatcgccagctgcctgaaggagcacgtggcagctgtggcgggcgagccccagccagccagctgcctgtcacgtctgttgggcaaactgcccgagctgcggaccctgtgcacccagggcctgcagcgcatcttctacctcaagctggaggacttggtgccccctccacccatcattgacaagatcttcatggacacgctgcccttctgacccctgcctgggaacacgtgtgcacatgcgcactctcatatgccaccccatgtgcctttagtccacggacccccagagcacccccaagcctgggcttgagctgcagaatgactccaccttctcacctgctccaggaggtttgcagggagctcaagcccttggggagggggatgccttcatgggggtgaccccacgatttgtcttatcccccccagcctggccccggcctttatgttttttgtaagataaaccgtttttaacacatagcgccgtgctgtaaataagcccagtgctgctgtaaatacaggaagaaagagcttgaggtgggagcggggctgggaggaagggatgggccccgccttcctgggcagcctttccagcctcctgctggctctctcttcctaccctccttccacatgtacataaactgtcactctaggaagaagacaaatgacagattctgacatttatatttgtgtattttcctggatttatagtatgtgacttttctgattaatatatttaatatattgaataaaaaatagacatgtagttggaactgaaaaagaaaaaaaaagggcggccg

SEQ ID NO: 104 - DNA, 4338 bp, Homo sapiens
  misc_feature: Incyte ID No: 440806.3
  unsure 2039-2083: a, t, c, g, or other
gatcaatactgaggccgcgtccgacccccttgagccgagatccccccccagcccagcccccaccccaccccccgcacacgccccaccccccccacgacccagcctcataccgcaccagctgaggcacccaagaggattaccccctggggccctctcccgccccccaaaaaagagaagatcccctctcctggcccatcccttcccttcttccctcccccctccccccgaactttccctctcgcatgcttttcccctgcaccacggatcgcctctcggatgccgcttgcctggaagctgcgttaggagcgagcggcggcggtggcggcggtggcggcggcggcggcagctcgggagtgctatgaccggcaaactcgccgagaagctgccggtgaccatgagcagtttgctaaaccaactgcctgacaatctgtaccccgaggagatccccagcgcgctcaacctcttctccggcagcagcgactcggtagtccattacaatcagatggctacagagaatgtaatggacatcggtctgaccaacgagaagcccaacccggaactctcttactccggctccttccagccagcccccggcaacaagaccgtgacctacttgggaaagttcgccttcgactccccttccaactggtgccaggacaacatcattagcctcatgagcgccggcatcttgggggtgcccccggcttcaggggcgctcagcacgcagacgtccacggccagcatggtgcagccaccgcagggtgacgtggaggccatgtatcccgcgctacccccctactccaactgcggcgacctctactcagagcccgtgtctttccacgacccccagggcaatcccgggctcgcctattccccccaggattaccaatcggccaagccggcgttggacagcaatctcttccccatgattcctgactacaacctctaccaccaccccaacgacatgggctccattccggagcacaagcccttccagggcatggaccccatccgggtcaacccgccccctactacccctctggagaccatcaaggcattcaaagacaagcagatccacccgggctttggcagcctgccccagccgccgctcaccctcaagcccatccggccccgcaagtaccccaaccggcctagcaagacaccgctccacgaacggccccacgcgtgcccggccgagggctgcgaccgccgtttcagccgttcggacgagctgacccggcacctgcgcatccacacagggccacaagcccttccagtgccggatctgcatgcggagcttcagccgcagcggaccacctcaccactcacatccgcactcatacgggcgagaagccctttgcctgcgagttctgcgggcgcaagtttgcgcgcagcgacgagcgcaagcgccacgccaagatccacctcaagcaaaaggagaagaaggcggagaagggcggtgcaccctctgcatcctcggcgccccccgtgtcgctggcccccgtggtcaccacctgcgcctgaggatcgggcccccagatccccacttttcccctccagtgcctcccggctgctagcctgaaagcagcgggaaagccagccacggaggcgtaggggccgcgccctggcctctccatggacgtgcggccccttgcttccccttcgatgcccccggttcccaacctttcacgccggccagcggtcaggggccagggctggaggcgccttcccctcgcggtcccccacttagccaaggcgtgggggcggaaaggtggcgtctagcccgctttgttcagttcggatcgccttgatccaggggccgccgggccgcgccaaggacctgcaagggactgaaggcggagcccatccaaccctcgcccgacccaaacacctcattgtttcccccacgtctccctctataccccctcgaagactcgagagggggagggggtaaggagcgcaccaaagcgcagagcttgctgcccgccgcacgcacgcgcgcctgcgtgcggggatgcgcgcgagtgtgtgcgtgctcnnnnnnnnnnnnnnnnnnnnnnnnnnnnnnnnnnnnnnnnnnnnncgcaagcgtgtgtgtttaagactcttgagctgaactgggctgtgtttaccccaaactcttccccacctcgggtccccaagccgctgggagatgtcccatgctgggggtccgcacgtggctggaggaggtggtcttccatccgctctgaaatcatgtttcttagagaaatgcctcggatgccgccgacgcggtgctgctgccgccgcttcgggtttggcccctcagaacccctccttttctgagcgcttccctcttaggcctcagggcagtttgatctgtggggagaaagagcagccatcgctgagcctgccttttaaaatatatgtgtatttccttagccccactctaagaaatctatgttcctgagtttgccctctgccctcccactccttccccttctcccctctaaaccttctcccatctctttcaaaatcttttcccagaaaggcaggcttcaaccagccactccagctttgtgtcttctctcaattacatagcaatttctccttcccaccatcatggggaagctggctctgcttttgccctttgtcatcaccaacacaacagatagaatttaaatataagtatatggtgtgcgtgtgtatgtatgtgtatgtatatgcatgcatgtgtataaagatgcacatgcgtacatatacataacatacacacaatatgtattcctagcaaaataaaatctctaaggtacttggttatccagtgcagtgcaccggaataaagagaatttgtaggcgtatacagctttaaatgatttattttttatgaaaatgttaactgatgagattatatctacatacgtgtgttatgtgtgtggatatagatgcacacatatctgtacatatacatgtgagtgtacatatatacacatatacacatctatgtatggatatgtgtgtatacacatatacacatctctgtccaaaatttcctcaaagatatggggattttttcatgaatccatgtggatgaatgaggtgtctcctttccatacccagtctcaccttctccccaccctacctcacctcttctcaggcacccctcttccccagctgtcctgccagcccttctcgtacagggtggctcctttgaagtggagtaatagggaaggttgctctctgccacagcttgcagcatggtcttgactgaatgtactgttcctgttagcgttacttctcctgtggtcagtaagttgcccagagagaaggaacaaaggtctggagtttacagaatgtctgtttttaaagtcactttatgcgttttccacttttttcttttttaagaaaaagaagtaccatttttgttttgttttgttttgatttttggtggtggataaataatactaaaaggactctagtggaaaggggggatatcgaagagcagggggttgtgaatttccaggtacttggactttttgtagaaggagagagaagaagatgaagtttgccaggagggcccatattttttcagctgaagggtaaaatctttctttgcagagacagtattttgctgaatactttttataatgtgatgattattaaaaaagcaaaaattttggtcacttccaagctagaaggaggaatcagataccctttaatattttttcctcgctccttctggtatatgcatgtcactgcatgataattgagttttcctttgttttaataaaactgttctcagacattaagctaaactaagagaaaaataactttgttgccaaaaggttgtgctatccagattttttatatgtctgcatgtttaaaaaaaaaaagcaacaaaagaaaatgcactctaacttatgtgaactgagagaaaaaaatcaggttttaaacaggaaaacctatggggaatgatattttttgaaagacttttgtataaagttgagtacttagaaaaaagacaaaccagatgtaatatattttgtggatgtttttatttcttggatttatagtaccttatactaaggttaaaaaaatatgcttgatattgtgaaaaggtgaaattcttcaccaacatttcatttgctcctttgtcatattgtaatgccaatataatatagttaatgaaaacagcatttttaaaaaccgaaatattgaaatggtgtaatgttgtaccatttgcactgtgagcaaatgctaatacagtaaatatattgtgtttgctgacaatcagccggcctataaatctccttattttatttcttgtttttatagcataaagctttagtttggcctgtt

SEQ ID NO: 105 - DNA, 5828 bp, Homo sapiens
  misc_feature: Incyte ID No: 349343.3
  unsure 1012-1074, 4044-4074, 5807: a, t, c, g, or other
ataaatgacgtgccgagagagcgagcgaacgcgcagccgggagagcggagtctcctgcctcccgccccccacccctccagctcctgctcctcctccgctccccatacacagacgcgctcacacccgctccctcactcgaacacacagacacaagcgcgcacacaggctccgcacacacacacttcgctctcccgcgcgctcacacccctcttgccctgagcccttgccggtgcagcgcggcgccgcagctggacgcccctcccgggctcactttgcaacgctgacggtgccggcagtggccgtggaggtgggaacagcggcggcatcctcccccctggtcacagcccaagccaggacgcccgcggaacctctcggctgtgctctcccatgagtcgggatcgcagcatcccccaccagccgctcaccgcctccgggagccgctgggcttgtacaccgcagcccttccgggacagcagctgtgactcccccccagtgcagatttcgggacagctctctagaaactcgctctaaagacggaaccgccacagcactcaaagcccactgcggaagagggcagcccggcaagcccgggccctgagcctggacccttagcggtgccgggcagcactgccggcgcttcgcctcgccggacgtccgctcctcctacactctcagcctccgctggagagacccccagccccaccattcagcgcgcaagataccctccagatatgccctgcgtccaagcccaatatagcccttcccctccaggttccagttatgcggcgcagacatacagctcggaatacaccacggagatcatgaaccccgactacaccaagctgaccatggaccttggcagcactgagatcacggctacagccaccacgtccctgcccagcatcagtaccttcgtggagggctactcgagcaactacgaactcaagccttcctgcgtgtaccaaatgcagcggcccttgatcaaagtggaggaggggcgggcgcccagctnnnnnnnnnnnnnnnnnnnnnnnnnnnnnnnnnnnnnnnnnnnnnnnnnnnnnnnnnnnnnnncatccattcctccagcctccagcccggaggacgaggtgctgcccagcacctccatgtacttcaagcagtccccaccgtccacccccaccacgccggccttccccccgcaggcgggggcgttatgggacgaggcactgccctcggcgcccggctgcatcgcacccggcccgctgctggacccgccgatgaaggcggtccccacggtggccggcgcgcgcttcccgctcttccacttcaagccctcgccgccgcatccccccgcgcccagcccggccggcggccaccacctcggctacgacccgacggccgctgccgcgctcagcctgccgctgggagccgcagccgccgcgggcagccaggccgccgcgcttgagggccacccgtacgggctgccgctggccaagagggcggccccgctggccttcccgcctctcggcctcacgccctcccctaccgcgtccagcctgctgggcgagagtcccagcctgccgtcgccgcccagcaggagtctcgtcgtctggcgagggcacgtgtgccgtgtgcggggacaacgccgcactgccagcactacggcgtgcgaacctgcgagggctgcaagggctttttcaagagaacagtgcagaaaaatgcaaaatatgtttgcctggcaaataaaaactgcccagtagacaagagacgtcgaaaccgatgtcagtactgtcgatttcagaagtgtctcagtgttggaatggtaaaagaagttgtccgtacagatagtctgaaagggaggagaggtcgtctgccttccaaaccaaagagcccattacaacaggaaccttctcagccctctccaccttctcctccaatctgcatgatgaatgcccttgtccgagctttaacagactcaacacccagagatcttgattattccagatactgtcccactgaccaggctgctgcaggcacagatgctgagcatgtgcaacaattctacaacctcctgacagcctccattgatgtatccagaagctgggcagaaaagattccgggatttactgatctccccaaagaagatcagacattacttattgaatcagcctttttggagctgtttgtcctcagactttccatcaggtcaaacactgctgaagataagtttgtgttctgcaatggacttgtcctgcatcgacttcagtgccttcgtggatttggggagtggctcgactctattaaagacttttccttaaatttgcagagcctgaaccttgatatccaagccttagcctgcctgtcagcactgagcatgatcacagaaagacatgggttaaaagaaccaaagagagtcgaagagctatgcaacaagatcacaagcagtttaaaagaccaccagagtaagggacaggctctggagcccaccgagtccaaggtcctgggtgccctggtagaactgaggaagatctgcaccctgggcctccagcgcatcttctacctgaagctggaagacttggtgtctccaccttccatcattgacaagctcttcctggacaccctacctttctaatcaggagcagtggagcagtgagctgcctcctctcctagcacctgcttgctacgcagcaaagggataggtttggaaacctatcatttcctgtccttccttaagaggaaaagcagctcctgtagaaagcaaagactttcttttttttctggctcttttccttacaacctaaagccagaaaacttgcagagtattgtgttggggttgtgttttatatttaggcattgggggatggggtgggagggggttatagttcatgagggttttctaagaaattgctaacaaagcacttttggacaatgctatcccagcaggaaaaaaaaggataatataactgttttaaaactctttctggggaatccaattatagttgctttgtatttaaaaacaagaacagccaagggttgttcgccagggtaggatgtgtcttaaagattggtcccttgaaaatatgcttcctgtatcaaaggtacgtatgtggtgcaaacaaggcagaaacttccttttaatttccttcttcctttattttaacaaatggtgaaagatggaggattacctacaaatcagacatggcaaaacaataatggctgtttgcttccataaacaagtgcaattttttaaagtgctgtcttactaagtcttgtttattaactctcctttattctatatggaaataaaaaggaggcagtcatgttagcaaatgacacgttaatatccctagcagaggctgtgttcaccttccctgtcgatcccttctgaggtatggcccatccaagacttttaggccattcttgatggaaccagatccctgccctgactgtccagctatcctgaaagtggatcagattataaactggattacatgtaactgttttggttgtgttctatcaaccccaccagagttccctaaacttgcttcagttatagtaactgactggtatattcattcagaagcgccataagtcagttgagtatttgatccctagataagaacatgcaaatcagcaggaactggtcatacagggtaagcaccagggacaataaggatttttatagatataatttaatttttgttattggttaaggagacaattttggagagcaagcaaatcttctttttaaaaaatagtatgaatgtgaatactagaaaagatttaagaaatagtatgagtgtgagtactaggaaggattagtgggctgcgtttcaacattccgtgttcgtactcccttttgtatgtttctactgttaatgccatattactatgagataatttgttgcatagtgtccttatttgtataaacatttgtatgcacgttatattgtaatagctttgcctgtatttattgcaagaccaccagctcctggaagctgagttacagagtaattaaatggggtgttcacagtgacttggatacaccaattagaaattaannnnnnnnnnnnnnnnnnnnnnnnnnnnnnngcaggttacatatatatatttataatgtgtctttttattaaccatttgtacaataaatgtcacttcccatgccgttattttatggttcatttgcagtgacttttaaggcagtactgtttagcactttgatattaaaattttgcttatgttttgctaaattcgaataatgtttgaagatttttaggtctaaaagtctttatattatatactctgtatcaagtcaaaatatctttggccattttgctaagaaacaaactttgaatgtcaaactgatgtcacagtagtttttgttagctttaaatcatttttgctttagtctttttaaaggaaaataacaaaactatgctgtttatattgtcattaaattatacaatcaaacaaatgccaaatgaattgcctaattgctgcaaagtataacccagataggaaatcatatgtttttttccaagagtcattctaatatttgattatgttatgtgtgcttttatgaaagattgttatttttatatatcaagatgatagaacctggaatgttaggattttgaaatgttagacttggaaggggcctggtctgtcaactagtccaaccccttaaaattcatagaggagcaaactggggcccattgaagggtgaagagttactcaaggtcaaacagctggtaacagaatcaagactaagacctaatttacctttccatactctttttttttctcaacttcatctatataaaatcaggcttttaaacataaccactaatatttacctgaagataaccatgagtaaagtatacttttgcattaattttttgagcttatatgcaaacataataaatattattaaatatcaggaaagctaacatttcatacaagatagcttcagaccaaattcaaattgaatttgaataaattagaaatactgtgcatacataaccttcttgtgcaccatgagtatttggaaagttaatccttgtttttgtcgtgtctataaaggaagaacaaaacaaaataaaaacagagccctagagaaatgctgttactttttatttttacacccatcagatttaaggaaaagactttttagccattataatctagtggttggaaggaatgaagaagcttttttagtaataggtccagatatgagtgctaaaaataaagatgatagcatgttcttctgtcttccatagttattacaactatgagagcctcccaagtcatcttatcaactcaactcccttttttttgtcttaatgttgcacataagtttatacagagtggatgaccacactagcacagaagagaacaacatgtattaaagcaggtgattcctccccttggcgggagagctctctcagtgtgaacatgccttctgtgggcggaaatcaggaagccaccagctgttaatggagagtgccttgcttttatttcagacagcagagttttccaaagtttctctgctcctctaacagcattgctctttagtgtgtgttaacctgtggtttgaaagaaatgctcttgtacattaacaatgtaaatttaaatgattaaattacattttatcaatggctactggtgtattgaataagcctgcttcatttaacagttttctcttaattattatgtaatagtatttgctgtgaactcttaagcacatccccaaaattgattttttaaaggcttagtaatgctgaaaaattaataggatttctgtattggatatatattaaaccttnctgattggaaagaaggaaaaa

SEQ ID NO: 106 - DNA, 1866 bp, Homo sapiens
  misc_feature: Incyte ID No: 277161.34
ctgggctcctttttaatcaaagctcaggaggagagctgcattccactgtttcacagatgctgtgagggtgacaaagatgcagggcacccactggaaacacagacggcactctgcgaaagaggaaggggcgccaggagcttgggtgagcaaggttggaggtgattctgcccctctccccaggctttctgtattagaaaactgaagcttcaagaacagacttgcctaacaacaggaaacttgtatgtctcgaagtggcaattcacacataaggctccatgactcctgaactctcacaaatattagttggctcttttcatggttttactgaagttgctagaagtttacagaaaaggaagtgcaggaacatttcacaaatctacaatctgtgagtatcacatcctgtatagctgtaaacactggaataaggaagggctgatgactttcagaagatgaaggtaagtagaaaccgttgatgggactgagaaaccagagttaaaacctctttggagcttctgaggactcagctggaaccaacgggcacagttggcaacaccatcatgacatcacaacctgttcccaatgagaccatcatagtgctcccatcaaatgtcatcaacttctcccaagcagagaaacccgaacccaccaaccaggggcaggatagcctgaagaaacatctacacgcagaaatcaaagttattgggactatccagatcttgtgtggcatgatggtattgagcttggggatcattttggcatctgcttccttctctccaaattttacccaagtgacttctacactgttgaactctgcttacccattcataggaccctttttttttatcatctctggctctctatcaatcgccacagagaaaaggttaaccaagcttttggtgcatagcagcctggttggaagcattctgagtgctctgtctgccctggtgggtttcattatcctgtctgtcaaacaggccaccttaaatcctgcctcactgcagtgtgagttggacaaaaataatataccaacaagaagttatgtttcttacttttatcatgattcactttataccacggactgctatacagccaaagccagtctggctggaactctctctctgatgctgatttgcactctgctggaattctgcctagctgtgctcactgctgtgctgcggtggaaacaggcttactctgacttccctgggagtgtacttttcctgcctcacagttacattggtaattctggcatgtcctcaaaaatgactcatgactgtggatatgaagaactattgacttcttaagaaaaaagggagaaatattaatcagaaagttgattcttatgataatatggaaaagttaaccattatagaaaagcaaagcttgagtttcctaaatgtaagcttttaaagtaatgaacattaaaaaaaaccattatttcactgtcatttaagatatgtgttcattggggatctcttgatttgcctgacattgacttcagcaaaagcacggggctgtaaattaccatttactagattagccaaatagtctgaatttccagaaaacaaggcagaatgatcattcccagaaacatttcccagaaaatgtttcccagaaaactagacagaatgatcattcaatggatcacagtgaagcaaaggacacaactttttattgtaccccttaattgtcaacaggagttaactgatttgttgtggtgctcagacttttttatacaggtgctagtgttttatcctatgtattttaactcattagtgcataaaggcaagccccatataatgaagtctcagggtatatgaaagtagctggcttcaaaataaaatttttgagtgcatattttgtttt

SEQ ID NO: 107 - DNA, 1329 bp, Homo sapiens
  misc_feature: Incyte ID No: 2588008CB1
gcaccatgcgcgcacagccatctccactccaaagttagacaaaatgccaggaatgttcttctctgctaacccaaaggaattgaaaggaaccactcattcacttctagacgacaaaatgcaaaaaaggaggccaaagacttttggaatggatatgaaagcatacctgagatctatgatcccacatctggaatctggaatgaaatcttccaagtccaaggatgtactttctgctgctgaagtaatgcaatggtctcaatctctggaaaaacttcttgccaaccaaactggtcaaaatgtctttggaagtttcctaaagtctgaattcagtgaggagaatattgagttctggctggcttgtgaagactataagaaaacagagtctgatcttttgccctgtaaagcagaagagatatataaagcatttgtgcattcagatgctgctaaacaaatcaatattgacttccgcactcgagaatctacagccaagaagattaaagcaccaacccccacgtgttttgatgaagcacaaaaagtcatatatactcttatggaaaaggactcttatcccaggttcctcaaatcagatatttacttaaatcttctaaatgacctgcaggctaatagcctaaagtgactggtccctggctgaagggaattaacagatagtatcaagcgcagaaggaatgtgccagtatggctccctgggtgaacagcttggccttttttgggtgtcttgacaggccaagaagaacaaatgactcagaatggattaacatgaaagttatccaggcgcagagttgaagaagcataagcaagacaaaaacagagagaccgcagaaggaggaagatactgtggtactgtcataaaaaacagtggagctctgtattagaaagcccctcagaactgggaaggccaggtaactctagttacacagaaactgtgactaaagtctatgaaactgattacaacagactgtaagaatcaaagtcaactgacatctatgctacatattattatatagtttgtactgagctattgaagtcccattaacttaaagtatatgttttcaaattgccattgctactattgcttgtcggtgttattttattttattgtttttgactttggaagagatgaactgtgtatttaacttaagctattgctcttaaaaccagggagtcagaatatatttgtaagttaaatcattggtgctaataataaatgtggattttgtattaaaatatatagaagcaatttctgtttacatgtccttgctacttttaaaaacttgcatttattcctcagattttaaaaataaataaataatt

SEQ ID NO: 108 - DNA, 2759 bp, Homo sapiens
  misc_feature: Incyte ID No: 1794550CB1
ttggacttgggaggcgcggtgaggagtcaggcttaaaacttgttggaggggagtaaccagcctgctcctctcgctctcctcctcgtctgcgccgcgtttcagaggttgcccatcagccttgtgatttatttttatatctgctttttataaagagagaaatatatatatatatatatatatatttttttcttcttaagagaaaattcctgttccaagagaaaataaggcaacatcaatgaaggagagaagagccagccagaaattatccagcaaatctatcatggatcctaatcagaacgtgaaatgcaagatagttgtggtgggagacagtcagtgtggaaaaactgcgctgctccatgtcttcgccaaggactgcttccccgagaattacgttcctacagtgtttgagaattacacggccagttttgaaatcgacacacaaagaatagagttgagcctgtgggacacttcgggttctccttactatgacaatgtccgccccctctcttaccctgattcggatgctgtgctgatttgctttgacatcagtagaccagagaccctggacagtgtcctcaaaaagtggaaaggtgaaatccaggaattttgtccaaataccaaaatgctcttggtcggctgcaagtctgatctgcggacagatgttagtacattagtagagctctccaatcacaggcagacgccagtgtcctatgaccagggggcaaatatggccaaacagattggagcagctacttatatcgaatgctcagctttacagtcggaaaatagcgtcagagacatttttcacgttgccaccttggcatgtgtaaataagacaaataaaaacgttaagcggaacaaatcacagagagccacaaagcggatttcacacatgcctagcagaccagaactctcggcagttgctacggacttacgaaaggacaaagcgaagagctgcactgtgatgtgaatctttcattatctttaatgaagacaaaggaatctagtgtaaaaaacaacagcaaacaaaaaggtgaagtctaaatgaagtgcacagccaaagtcatgtataccagaggcttaggaggcgtttgagaggatactcatctttttggaatcctgaccttaggttcggcatgtagaccaagtgatgagaagtgaatacatggaagagtttttaagtgtgacttgaaaaatatgccaaaaaatgagagatacaaatgagctagaggaagatgaggggggatgcgagtacctccaagaagaaaaatcacactctgaatggtgcttgcatttttgggtttttttttttttttgttataatctattcatggatctccactttgatttaatttttaaatgttttaatctcctttacaaaaagtatacgttaatataccgtcctcaagggggaactggcactgtgaccttagcatttagttttctagaggatgtgatctaatttctttctagctcatcattaaaaaggaaattgtatcaggacccatgggatatatccagaggcaaactttatgaggctttgaaatcttgccttcctgaagatagctgagtaggatggttctaaggaaagcctttgcaatcttgcaagatttgtagaccagcactacaaagatcgcatagatcaaataggaaaaaaaatgtcgatttttattcagtctgatggttctgttcttcattgtgattgtcattaaaaagtggtaaattgctcaatgtaatatttttgtgcgctgtttagaagttgtgtgattttttgccatcgttgataaaaatgcaaagtcaaataaaaggtgtcttggtttgatgtcatagaatgatccaaggagagaaaaaaggtagttactgttttcaccagaaaaggtaatgagtgaaggaaagaatagtagcagaaagcacagtttgtgagtaaagctgtctggaattaagttaccaaaaatacaaagcaaaaggactattattttgggttgaagctccaaaactgacagcatctgataatctgttggtttatttcacttttcattaaatgaacattgatgagagaagatgccacttacccaagctttagagaatccctagtggaagattatatgataaactttcagtcctgacataacactagggcatttctagagtgtcattgctaaaacctcactgaacagacgcagccaaggtctgtgttcagcacttggtctctgttgttacgtaaaataataagcatttaaaatagtttacagatatttttgaccagttccttttagagattctttcagagaagaaaccagatctgacctgtttattgttggcgcttgttgaaaacgagctttctttcccatgatagtgcttcgtttttgaagtgttgaagctgtgctccccttaaatcgtggcaggagagattaaggtaattacaacactcagttctatgtcttacaagcactttgtcttgtctctgcaagaaaattcgattccagtcatttcccataaaatacagacattttaccaacataatatgctttgattgatgcagcattatgctttgggcagtattacaaaatagctggcgagtgctttctgtatttaaatattgtaaaaagaaaataagttataactgttataaagcagaacttttgttgcattttttaaactgttgaagtcactgtgtatgtttgtttggtcaatgtttccgcagtatttattaaaacatacttttttttttcttcaaataaaaaagtaaccatgtcttt

SEQ ID NO: 109 - DNA, 4150 bp, Homo sapiens
  misc_feature: Incyte ID No: 075272.34
ccgccccttttgtttcttttttccattaaaaaaactttattttcattttttacaaagaatatccccatctggggtaaaaatatatctggttaagtacaaaatatagtctttaccatacaaaaagatacataatacaaaaacatgaaaccaaccatcttcagcccacactttctggctgtaataactctcagaaaagggtggagctcagtgctctgacacaggacagtgaacaaagtgctatggctgagagtgactgaccaagtgctggcagctgcagtgaggggccaatatccctatctcctaacacagggcaggaagggggttcaaagggcttttatgaagacctgccctctagtttctcatggcagtatttggaggttctgatcacagggttgggcatcttgatcaagagttcctccttgggtttgaagtcacagtgggcaaggctgacagcagcaaccctttcacatgatttaagcgttagaattatataattctgtacattggggcaatctcaaaagtagtaaaatttttttttgtcttttggcttaaccctagagacacagtagaccagtttcagcttacatttaagatggcagaaggggagaacaaaaaatttgacaggaattaaagtgctaagaacatcaccttagaatcaattccaaggacttacatgaagagaaaaccatcctcccatatgaaaatatttgcagtaggagaacacagtgcaataggctccaaaaatggcttttaagacctttggtggggcagttactactgctttaaaagccaggttaaagtatactctaagcaaagatgaccgtagagcagctagcttccttttttataatcacagggaaagctctctccattgtccatcaaatcagctctagaaggtttttctttttttttctacaagtgcacaaaggggaaacactgattttaagaacctccttttcccaaagttttggccacaatttcccttttcatcttcctagtttgttaaattggctcttctccacatgatacgtaagttcaaggtccaaagttcctatcacaatttacaaaaagcctccaaaaaaccttgaaaagcttacgccaggaggccatttttacctgacccgaaactatcgaaaaggcctcaattttcaaggagatctgagaaaatggatgggcctgagtttttctagttatttttaaacccatccaacaaacacccctgtatcacaacatgggcgctggctgaggatgagtccgcatcctttaaggcccaggagattgcctgctgaccacctcctacattaggaagtcagaggctaaggtggacccacactccattgcagagactgttgagtctctgaaaaagtgagtgtccaggaagagagacaaaaagaaacaagtaggtaaagctgcttcttttcttccacatgctcactgcacattgttgttgaggatgcagggatccacctaaagaaagaaacagactatttcagttcaggtaagaacaaaaagaacaaaccagtttagcaatccgtctaagtcaacttcttatagaaagcttaggacaaatttaacagtaaagatgacaatcctcacctcagtataagtcggtggtggcatgaacttgaactcaggggcatacataaagatagggctgtcttgagagccatccatgtcatctagcagaggagtggttgggctctccaatcggtgatcttcaggaatgacatccatatagcagggaggagctagaaaagaaaatatggccacataagaatcctgcccaagaaatgctggaccatcacaattttacaaacccaggtagaccagaaacaaagaaaagacattaggtctggctcaccttctggggtatcagggatgttcagatctacccaactcatctcagagctggttcggctggccatgctggatgttctgctgcttagacctgatctgctgccaattaccaggggcaggtcaaggatgaccttcttggatccaggaacgctaacatagatctagaaaggaagatggcagtttattacaccagaggtctggagaaacaagacagctgtggtaacagatgaacaatttctctgctgaagccaccctgcatctacccaccagtaaggaatattcaactcgaaggatgttgcagcccaggatagaaggcctgatcttctgaacccgaaggctcttgccacgccatgatgcgcatgtccctgagataatatgattgcctctgactgatgacaacttctgagtcagcaccttggtctggccattggcaaggtaagtgtggcgggccacaatggcagctttggggaccacaattcgggaacatgtattctcaaagtcagcatggatggaaatctcatcacctagcaatgagaaagatgaaaacttactgatactcagtatagttaatgacacttcctctaccccagtcccatgcccttgcccctaaacccagttcctgttttaactgccataagcactaggattttaccttcacagaatccttttctgtcaattcgagcagagacagacacccgcccatcaggaatgaacatgcaggaaactttcttttcttttttagcagacacaggtgcctatatagaaggggataaaaaggtgttttgagatgcttcaatctaatgcccaagacgtctgatttatcatcctcatgacccaggagaatagaatctttaaaatggatctcaccattaaatcaggggtattgacatccaccagatccactacttcaaagtttttctttgtctcttgagttggctggctcgggcggtcaagaaaagccttcacccagtagtctacacacccatattttcctttgaaggatgttcccagaggcctgtgtcaagaaaatgaaaattttaaaacgctctccaagaacagtaagtgatcaaaggagggcaagatattttagacagaaaagttcaaagatgcatttagctgatatttacccctgaggaagctcaaagccgaacttgtactcatatttgtttccaggtctcatgatcaccatctcattctcacctgaagggaaagaaaatcgagtagccattaggcttgctgttacacttaaaatgcatctgtgtgataaggaatgcttgggtggcatgcaaggtattgaagtacccccaatttcatcccatatatatattttttaatccatcccatattgttcttaaagagaaattctgatgtattttgtcgggcagcaagttgccaagccctgcaatactgaaagattcacccaggacagttctctactaacatctcaaataggaagtagacaaagaataagcaacttatgcacacataagactttaactacccgaggcaacgcccctcaggatcccctttaggacacagcaccataaaaaattgtacaaatcacccttttatcaggggggggaggagaatgtctgcaaattaaaacagaaaaaaggaagcaacaacacgtaattcaaaccactcaaactgagcaacttaaaacatttcgtacaggttttgtgtattcaattctcttctctaatcagctttcaccctccaacaatgaattgggccgcttacctgttggctggtcttccagaagaagcgtgtcttcatagcgcaggtactccgaagtctgtttgcactgctgggatccctgcatccaaagcactttagccactccgcaagccaggatcctaacggctttgacacgagtaacttcacacacctccactatcacccggccagccaccttctcgccactgccgtacaccttttcagggtcgttaaagaccacctcaaaagacttgatcttcttgaacatcaccatgatggaactgagttggttttaagagttagaaatgacggtggaagaaaaaaaaagctccaaatcgaggaaacccctttgcaaaaaattatttcactttaaggaattaaggtattcttaagcagtttgagcttaaaaataaaataagatttaaacaaatgaatattaactactaggttttcgaaaaggcgcctaaaaaatatacgccgctggttacactaagctaattcagagaaaaagccttctttcccccaattgctggagaaaagatccgatctccacaagcactcctttggagaaaaagag

SEQ ID NO: 110 - DNA, 1682 bp, Homo sapiens
  misc_feature: Incyte ID No: 236030.3
gaacagccagcaggttttgctaagtcaactgtaatgcccttatccaatcagaattagggagggaaaatggctttgcagataaatatggcacactagccccacgttttctgagacattcctcaattgcttagacatattctgagcctacagcagaggaacctccagtctcagcaccatgaatcaaactgccattctgatttgctgccttatctttctgactctaagtggcattcaaggagtacctctctctagaactgtacgctgtacctgcatcagcattagtaatcaacctgttaatccaaggtctttagaaaaacttgaaattattcctgcaagccaattttgtccacgtgttgagatcattgctacaatgaaaaagaagggtgagaagagatgtctgaatccagaatcgaaggccatcaagaatttactgaaagcagttagcaaggaaaggtctaaaagatctccttaaaaccagaggggagcaaaatcgatgcagtgcttccaaggatggaccacacagaggctgcctctcccatcacttccctacatggagtatatgtcaagccataattgttcttagtttgcagttacactaaaaggtgaccaatcatggtcaccaaatcagctgctactactcctgtaggaaggttaatgttcatcatcctaagctattcagtaataactctaccctggcactataatgtaagctctactgaggtgctatgttcttagtggatgttctgaccctgcttcaaatatttccctcacctttcccatcttccaagggtactaaggaatctttctgctttggggtttatcagaattctcagaatctcaaataactaaaaggtatgcaatcaaatctgctttttaaagaatgctctttacttcatggacttccactgccatcctcccaaggggcccaaattctttcagtggctacctacatacaattccaaacacatacaggaaggtagaaatatctgaaaatgtatgtgtaagtattcttatttaatgaaagactgtacaaagtagaagtcttagatgtatatatttcctatattgttttcagtgtacatggaataacatgtaattaagtactatgtatcaatgagtaacaggaaaattttaaaaatacagatagatatatgctctgcatgttacataagataaatgtgctgaatggttttcaaaataaaaatgaggtactctcctggaaatattaagaaagactatctaaatgttgaaagaccaaaaggttaataaagtaattataactaaaaaaaacacaaaaaaaacactcgaggggggcgcccggatacccaaatttcgcccatatagctgaggtcgtattaccaaatctcactggccgtcgtttaacaacgtcgtgctggggaaaacccgggcgttacccaaataaatcgccttgtgcaaattccccatattcgaaaacacactgattgaaacaccttaccagctctgaagccactagtcactgattaccgacacacacgcaacattcatcgaacccttacgtacaaacaaagaagcggacatcccattcacaaaagtcacaggcctgaaaccactgccaatgcccttgtatacttgcgcagaaagcgcccaaggttgttgcccacagcacgaccgccatgccacttacgccgtccacatacgag

SEQ ID NO: 111 - DNA, 1661 bp, Homo sapiens
  misc_feature: Incyte ID No: 1749102CB1
cagcaactattataagatgctctgaaaactcttcagacactgaggggcaccagaggagcagactacaagaatggcacacgctatggaaaactcctggacaatcagtaaagagtaccatattgatgaagaagtgggctttgctctgccaaatccacaggaaaatctacctgatttttataatgactggatgttcattgctaaacatctgcctgatctcatagagtctggccagcttcgagaaagagttgagaagttaaacatgctcagcattgatcatctcacagaccacaagtcacagcgccttgcacgtctagttctgggatgcatcaccatggcatatgtgtggggcaaaggtcatggagatgtccgtaaggtcttgccaagaaatattgctgttccttactgccaactctccaagaaactggaactgcctcctattttggtttatgcagactgtgtcttggcaaactggaagaaaaaggatcctaataagcccctgacttatgagaacatggacgttttgttctcatttcgtgatggagactgcagtaaaggattcttcctggtctctctattggtggaaatagcagctgcttctgcaatcaaagtaattcctactgtattcaaggcaatgcaaatgcaagaacgggacactttgctaaaggcgctgttggaaatagcttcttgcttggagaaagcccttcaagtgtttcaccaaatccacgatcatgtgaacccaaaagcatttttcagtgttcttcgcatatatttgtctggctggaaaggcaacccccagctatcagacggtctggtgtatgaagggttctgggaagacccaaaggagtttgcagggggcagtgcaggccaaagcagcgtctttcagtgctttgacgtcctgctgggcatccagcagactgctggtggaggacatgctgctcagttcctccaggacatgagaagatatatgccaccagctcacaggaacttcctgtgctcattagagtcaaatccctcagtccgtgagtttgtcctttcaaaaggtgatgctggcctgcgggaagcttatgacgcctgtgtgaaagctctggtctccctgaggagctaccatctgcaaatcgtgactaagtacatcctgattcctgcaagccagcagccaaaggagaataagacctctgaagacccttcaaaactggaagccaaaggaactggaggcactgatttaatgaatttcctgaagactgtaagaagtacaactgagaaatcccttttgaaggaaggttaatgtaacccaacaagagcacattttatcatagcagagacatctgtatgcattcctgtcattacccattgtaacagagccacaaactaatactatgcaatgttttaccaataatgcaatacaaaagacctcaaaatacctgtgcatttcttgtaggaaaacaacaaaaggtaattatgtgtaattatactagaagttttgtaatctgtatcttatcattggaataaaatgacattcaataaataaaaatgcataagatatattctgtcggctgggcgcggtggctcacgcctgtaatcccagcactttgggaggccgaggcgggcggatcacaaggtcaggagatcgagaccatcttggctaacacggtgaaacccgtctc

SEQ ID NO: 112 - DNA, 797 bp, Homo sapiens
  misc_feature: Incyte ID No: 003360CB1
tgggcggacgcgtgggcggacgcgtgggcaggcagcaaagagtagtcagtcccttcttggctctgctgacactcgagcccacattccatcacctgctcccaatcatgcaggtctccactgctgcccttgccgtcctcctctgcaccatggctctctgcaaccaggtcctctctgcaccacttgctgctgacacgccgaccgcctgctgcttcagctacacctcccggcagattccacagaatttcatagctgactactttgagacgagcagccagtgctccaagcccagtgtcatcttcctaaccaagagaggccggcaggtctgtgctgaccccagtgaggagtgggtccagaaatacgtcagtgacctggagctgagtgcctgaggggtccagaagcttcgaggcccagcgacctcagtgggcccagtggggaggagcaggagcctgagccttgggaacatgcgtgtgacctctacagctacctcttctatggactggttattgccaaacagccacactgtgggactcttcttaacttaaattttaatttatttatactatttagtttttataatttatttttgatttcacagtgtgtttgtgattgtttgctctgagagttccccctgtcccctccaccttccctcacagtgtgtctggtgacaaccgagtggctgtcatcggcctgtgtaggcagtcatggcaccaaagccaccagactgacaaatgtgtatcagatgcttttgttcagggctgtgatcggcctggggaaataataaagatgttcttttaaac

SEQ ID NO: 113 - DNA, 588 bp, Homo sapiens
  misc_feature: Incyte ID No: 1398150.29
agagtccctataaagagagattcccaactcagtatcagcacaggacacagctaggttctgaagcttctgagttctgcagcctcacctctgagaaaacctctttgccaccaataccatgaagctctgcgtgactgtcctgtctctcctcgtgctagtagctgccttctgctctctagcactctcagcaccaaattccaaaccaaaagaggcaagcaagtctgcgctgaccccagtgagtcctgggtccaggagtacgtgtatgacctggaactgaactgagctgctcagagacaggaagtcttcagggaaggtcacctgagcctggatgcttctccatgagccgcatctcctccatactcaggactcctctccgcagttcctgtctcttctcttaatgtaatctcttttatgtgctgtattattgtattaggtgttatttccattatttatattagtttagccaaaggataagtgtcccctatggggatggtccactctcactctttctctgctgttgcaaatacatggataacaccgttaattccatgtgttttcataataaaactttaaaataaaatgcaaacagtt

SEQ ID NO: 114 - DNA, 824 bp, Homo sapiens
  misc_feature: Incyte ID No: 088564CB1
gcactcccaaagaactgggtactcaacactgagcagatctgttctttgagctaaaaaccatgtgctgtaccaagagtttgctcctggctgctttgatgtcagtgctgctactccacctctgcggcgaatcagaagcagcaagcaactttgactgctgtcttggatacacagaccgtattcttcatcctaaatttattgtgggcttcacacggcagctggccaatgaaggctgtgacatcaatgctatcatctttcacacaaagaaaaagttgtctgtgtgcgcaaatccaaaacagacttgggtgaaatatattgtgcgtctcctcagtaaaaaagtcaagaacatgtaaaaactgtggcttttctggaatggaattggacatagcccaagaacagaaagaaccttgctggggttggaggtttcacttgcacatcatggagggtttagtgcttatctaatttgtgcctcactggacttgtccaattaatgaagttgattcatattgcatcatagtttgctttgtttaagcatcacattaaagttaaactgtattttatgttatttatagctgtaggttttctgtgtttagctatttaatactaattttccataagctattttggtttagtgcaaagtataaaattatatttgggggggaataagattatatggactttcttgcaagcaacaagctattttttaaaaaaaaactatttaacattcttttgtttatattgttttgtctcctaaattgttgtaattgcattataaaataagaaaaatattaataagacaaatattgaaaataaagaaacaaaaagtt

SEQ ID NO: 115 - DNA, 1638 bp, Homo sapiens
  misc_feature: Incyte ID No: 149431.7
tcaacagagaaatttctcagcctcctacttctgcttttgaaagctataaaaacagcgagggagaaactggcagataccaaacctcttcgaggcacaaggcacaacaggctgctctgggattctcttcagccaatcttcattgctcaagtgtctgaagcagccatggcagaagtacctgagctcgccagtgaaatgatggcttattacagtggcaatgaggatgacttgttctttgaagctgatggccctaaacagatgaagtgctccttccaggacctggacctctgccctctggatggcggcatccagctacgaatctccgaccaccactacagcaagggcttcaggcaggccgcgtcagttgttgtggccatggacaagctgaggaagatgctggttccctgcccacagaccttccaggagaatgacctgagcaccttctttcccttcatctttgaagaagaacctatcttcttcgacacatgggataacgaggcttatgtgcacgatgcacctgtacgatcactgaactgcacgctccgggactcacagcaaaaaagcttggtgatgtctggtccatatgaactgaaagctctccacctccagggacaggatatggagcaacaagtggtgttctccatgtcctttgtacaaggagaagaaagtaatgacaaaatacctgtggccttgggcctcaaggaaaagaatctgtacctgtcctgcgtgttgaaagatgataagcccactctacagctggagagtgtagatcccaaaaattacccaaagaagaagatggaaaagcgatttgtcttcaacaagatagaaatcaataacaagctggaatttgagtctgcccagttccccaactggtacatcagcacctctcaagcagaaaacatgcccgtcttcctgggagggaccaaaggcggccaggatataactgacttcaccatgcaatttgtgtcttcctaaagagagctgtacccagagagtcctgtgctgaatgtggactcaatccctagggctggcagaaagggaacagaaaggtttttgagtacggctatagcctggactttcctgttgtctacaccaatgcccaactgcctgccttagggtagtgctaagaggatctcctgtccatcagccaggacagtcagctctctcctttcagggccaatccccagcccttttgttgagccaggcctctctcacctctcctactcacttaaagcccgcctgacagaaaccacggccacatttggttctaagaaaccctctgtcattcgctcccacattctgatgagcaaccgcttccctatttatttatttatttgtttgtttgttttattcattggtctaatttattcaaagggggcaagaagtagcagtgtctgtaaaagagcctagtttttaatagctatggaatcaattcaatttggactggtgtgctctctttaaatcaagtcctttaattaagactgaaaatatataagctcagattatttaaatgggaatatttataaatgagcaaatatcatactgttcaatggttctgaaataaacttcactgaagaaaaaaaatctatgtcggtgcggagaaagaggtaatgaaatggcaggaattcgatatcagcttat

SEQ ID NO: 116 - DNA, 4567 bp, Homo sapiens
  misc_feature: Incyte ID No: 1750533CB1
gcggccgccaagagagatcacacccccagccgaccctgccagcgagcgagcccgaccccaggcgtccatggagcgtcgcctccgcccggtccctgccccgacccccgcctgcggcgcggctcctgccttgaccaggacttgggactttgcgaaaggatcgcggggcccggagaggtaaccgccgcgcctcccggagaggtgttggagagcacaatggctgaacaagtccttcctcaggctttgtatttgagcaatatgcggaaagctgtgaagatacgggagagaactccagaagacatttttaaacctactaatgggatcattcatcattttaaaaccatgcaccgatacacactggaaatgttcagaacttgccagttttgtcctcagtttcgggagatcatccacaaagccctcatcgacagaaacatccaggccaccctggaaagccagaagaaactcaactggtgtcgagaagtccggaagcttgtggcgctgaaaacgaacggtgacggcaattgcctcatgcatgccacttctcagtacatgtggggcgttcaggacacagacttggtactgaggaaggcgctgttcagcacgctcaaggaaacagacacacgcaactttaaattccgctggcaactggagtctctcaaatctcaggaatttgttgaaacggggctttgctatgatactcggaactggaatgatgaatgggacaatcttatcaaaatggcttccacagacacacccatggcccgaagtggacttcagtacaactcactggaagaaatacacatatttgtcctttgcaacatcctcagaaggccaatcattgtcatttcagacaaaatgctaagaagtttggaatcaggttccaatttcgcccctttgaaagtgggtggaatttacttgcctctccactggcctgcccaggaatgctacagataccccattgttctcggctatgacagccatcattttgtacccttggtgaccctgaaggacagtgggcctgaaatccgagctgttccacttgttaacagagaccggggaagatttgaagacttaaaagttcactttttgacagatcctgaaaatgagatgaaggagaagctcttaaaagagtacttaatggtgatagaaatccccgtccaaggctgggaccatggcacaactcatctcatcaatgccgcaaagttggatgaagctaacttaccaaaagaaatcaatctggtagatgattactttgaacttgttcagcatgagtacaagaaatggcaggaaaacagcgagcaggggaggagagaggggcacgcccagaatcccatggaaccttccgtgccccagctttctctcatggatgtaaaatgtgaaacgcccaactgccccttcttcatgtctgtgaacacccagcctttatgccatgagtgctcagagaggcggcaaaagaatcaaaacaaactcccaaagctgaactccaagccgggccctgaggggctccctggcatggcgctcggggcctctcggggagaagcctatgagcccttggcgtggaaccctgaggagtccactggggggcctcattcggccccaccgacagcacccagcccttttctgttcagtgagaccactgccatgaagtgcaggagccccggctgccccttcacactgaatgtgcagcacaacggattttgtgaacgttgccacaacgcccggcaacttcacgccagccacgccccagaccacacaaggcacttggatcccgggaagtgccaagcctgcctccaggatgttaccaggacatttaatgggatctgcagtacttgcttcaaaaggactacagcagaggcctcctccagcctcagcaccagcctccctccttcctgtcaccagcgttccaagtcagatccctcgcggctcgtccggagcccctccccgcattcttgccacagagctggaaacgacgcccctgctggctgcctgtctcaagctgcacggactcctggggacaggacggggacgagcaagtgcagaaaagccggctgcgtgtattttgggactccagaaaacaagggcttttgcacactgtgtttcatcgagtacagagaaaacaaacattttgctgctgcctcagggaaagtcagtcccacagcgtccaggttccagaacaccattccgtgcctggggagggaatgcggcacccttggaagcaccatgtttgaaggatactgccagaagtgtttcattgaagctcagaatcagagatttcatgaggccaaaaggacagaagagcaactgagatcgagccagcgcagagatgtgcctcgaaccacacaaagcacctcaaggcccaagtgcgcccgggcctcctgcaagaacatcctggcctgccgcagcgaggagctctgcatggagtgtcagcatcccaaccagaggatgggccctggggcccaccggggtgagcctgcccccgaagacccccccaagcagcgttgccgggcccccgcctgtgatcattttggcaatgccaagtgcaacggctactgcaacgaatgctttcagttcaagcagatgtatggctaaccggaaacaggtgggtcacctcctgcaagaagtggggcctcgagctgtcagtcatcatggtgctatcctctgaacccctcagctgccactgcaacagtgggcttaagggtgtctgagcaggagaggaaagataagctcttcgtggtgcccacgatgctcaggtttggtaacccgggagtgttcccaggtggccttagaaagcaaagcttgtaactggcaagggatgatgtcagattcagcccaaggttcctcctctcctaccaagcaggaggccaggaacttctttggacttggaaggtgtgcggggactggccgaggcccctgcaccctgcgcatcaggactgcttcatcgtcttggctgagaaagggaaaagacacacaagtcgcgtgggttggagaagccagagccattccacctcccctcccccagcatctctcagagatgtgaagccagatcctcatggcagcgaggccctctgcaagaagctcaaggaagctcagggaaaatggacgtattcagagagtgtttgtagttcatggtttttccctacctgcccggttcctttcctgaggacccggcagaaatgcagaaccatccatggactgtgattctgaggctgctgagactgaacatgttcacattgacagaaaaacaagctgctctttataatatgcaccttttaaaaaattagaatattttactgggaagacgtgtaactctttgggttattactgtctttacttctaaagaagttagcttgaactgaggagtaaaagtgtgtacatatataatatacccttacattatgtatgagggatttttttaaattatattgaaatgctgccctagaagtacaataggaaggctaaataataataacctgttttctggttgttgttggggcatgagcttgtgtatacactgcttgcataaactcaaccagctgcctttttaaagggagctctagtcctttttgtgtaattcactttatttattttattacaaacttcaagattatttaagtgaagatatttcttcagctctggggaaaatgccacagtgttctcctgagagaacatccttgctttgagtcaggctgtgggcaagttcctgaccacagggagtaaattggcctctttgatacacttttgcttgcctccccaggaaagaaggaattgcatccaaggtatacatacatattcatcgatgtttcgtgcttctccttatgaaactccagctatgtaataaaaaactatactctgtgttctgttaatgcctctgagtgtcctacctccttggagatgagatagggaaggagcagggatgagactggcaatggtcacagggaaagatgtggccttttgtgatggttttattttctgttaacactgtgtcctgggggggctgggaagtcccctgcatcccatggtaccctggtattgggacagcaaaagccagtaaccatgagtatgaggaaatctctttctgttgctggcttacagtttctctgtgtgctttgtggttgctgtcatatttgctctagaagaaaaaaaaaaaaaggaggggaaatgcattttccccagagataaaggctgccattttgggggtctgtacttatggcctgaaaatatttgtgatccataactctacacagcctttactcatactattaggcacactttccccttagagccccctaagtttttcccagacgaatctttataatttctttccaaagataccaaataaacttcagtgttttcatctaattctcttaaagttgatatcttaatattttgtgttgatcattatttccattcttaatgtgaaaaaaagtaattatttatacttattataaaaagtatttgaaatttgcacatttaattgtccctaatagaaagccacctattctttgttggatttcttcaagtttttctaaataaatgtaacttttcacaagagtcaacattaaaaaataaa

SEQ ID NO: 117 - DNA, 1220 bp, Homo sapiens
  misc_feature: Incyte ID No: 1324237.8
  unsure 651, 656: a, t, c, g, or other
tcgggatcgatctggagctccgggaatttccctggcccgggactccgggctttccagccccaaccatgcataaaaggggttcgccgttctcggagagccacagagcccgggccacaggcagctccttgccagctctcctcctcgcacagccgctcgaaccgcctgctgagcccccatggcccgcgccacgctctccgccgcccccagcaatccccggctcctgcgggtggcgctgctgctcctgctcctggtggccgccagccggcgcgcagcaggagcgcccctggccactgaactgcgctgccagtgcttgcagaccctgcagggaattcacctcaagaacatccaaagtgtgaaggtgaagtcccccggaccccactgcgcccaaaccgaagtcatagccacactcaagaatgggcagaaagcttgtctcaaccccgcatcgcccatggttaagaaaatcatcgaaaagatgctgaaaaatggcaaatccaactgaccagaaggaaggaggaagcttattggtggctgttcctgaaggaggccctgcccttacaggaacagaagaggaaagagagacacagctgcagaggccacctggattgcgcctaatgtgtttgagcatcacttaggagaagtcttctattaatnaattnattaatttatttatttgtttgttttagaagattctatgttaatattttatgtgtaaaataaggttatgattgaatctacttgcacactctcccattatatttattgtttattttaggtcaaacccaagttagttcaatcctgattcatatttaatttgaagatagaaggtttgcagatattctctagtcatttgttaatatttcttcgtgatgacatatcacatgtcagccactgtgatagaggctgaggaatccaagaaaatggccagtaagatcaatgtgacggcagggaaatgtatgtgtgtctattttgtaactgtaaagatgaatgtcagttgttatttattgaaatgatttcacagtgtgtggtcaacatttctcatgttgaagctttaagaactaaaatgttctaaatatcccttggacattttatgtctttcttgtaaggcatactgccttgtttaatgttaattatgcagtgtttccctctgtgttagagcagagaggtttcgatatttattgatgttttcacaaagaacaggaaaataaaatatttaaaaatat

SEQ ID NO: 118 - DNA, 2672 bp, Homo sapiens
  misc_feature: Incyte ID No: 1283029.16
gaaattcaagggacccaaatttaagataccagagatgcacctgaaggctcccaaaatatcgatgcctgacattgatttaaacctgaagggccccaaagtcaagggcgatgtggatgtttctctgcccaaaatggaaggtgacctcaagggtcctgaagttgacatcaagggccccaaagtggacattaatgctccagatgttgatgttcaaggcccagactggcacctgaagatgcccaaggtgaaaatgcccaagttcagcatgcctggcttcaaaggagagggcccagatgtggatgtgaacctgcccaaggctgaccttgatgtctcaggacccaaggtggacgttgatgtcccagatgtgaatatcgaaggtccagaaggaaagctgaaaggtcccaaattcaagatgcctgagatgaacatcaaaaccccaagatctccatgcctgatgttgatctcaaccttgaaagggacccaaagtcaaaggtagatgtggatgtgtctgtcgccaaaggtggaaggagagttaaaaggtccagaattggatgtcaaaggtcccaaattagatgctgacatgccagaagtagctgtggaaggccatttgggctgtgtgtgcgacgcgggtcggaggggcagtcgggggaaccgcgaagaagccgaggagcccggagccccgcgtgacgctcctctctcagtccaaaagcggcttttggttcggcgcagagagacccgggggtctagcttttcctcgaaaagcgccgccctgcccttggccccgagaacagacaaagagcaccgcagggccgatcacgctgggggcgctgaggccggccatggtcatggaagtgggcaccctggacgctggaggcctgcgggcgctgctgggggagcgagcggcgcaatgcctgctgctggactgccgctccttcttcgctttcaacgccggccacatcgccggctctgtcaacgtgcgcttcagcaccatcgtgcggcgccgggccaagggcgccatgggcctggagcacatcgtgcccaacgccgagctccgcggccgcctgctggccggcgcctaccacgccgtggtgttgctggacgagcgcagcgccgccctggacggcgccaagcgcgacggcaccctggccctggcggccggcgcgctctgccgcgaggcgcgcgccgcgcaagtcttcttcctcaaaggaggatacgaagcgttttcggcttcctgcccggagctgtgcagcaaacagtcgacccccatggggctcagccttcccctgagtactagcgtccctgacagcgcggaatctgggtgcagttcctgcagtaccccactctacgatcagggtggcccggtggaaatcctgccctttctgtacctgggcagtgcgtatcacgcttcccgcaaggacatgctggatgccttgggcataactgccttgatcaacgtctcagccaattgtcccaaccattttgagggtcactaccagtacaagagcatccctgtggaggacaaccacaaggcagacatcagctcctggttcaacgaggccattgacttcatagactccatcaagaatgctggaggaagggtgtttgtccactgccaggcaggcatttcccggtcagccaccatctgccttgcttaccttatgaggactaatcgagtcaagctggacgaggcctttgagtttgtgaagcagaggcgaagcatcatctctcccaacttcagcttcatgggccagctgctgcagtttgagtcccaggtgctggctccgcactgttcggcagaggctgggagccccgccatggctgtgctcgaccgaggcacctccaccaccaccgtgttcaaccgaggcacctccaccaccaccgtgttcaacttccccgtctccatccctgtccactccacgaacagtgcgctgagctaccttcagagccccattacgacctctcccagctgctgaaaggccacgggaggtgaggctcttcacatcccattgggactccatgctccttgagaggagaaatgcaataactctgggaggggctcgagagggctggtccttatttatttaacttcacccgagttcctctgggtttctaagcagttatggtgatgacttagcgtcaagacatttgctgaactcagcacattcgggaccaatatatagtgggtacatcaagtccatctgacaaaatggggcagaagagaaaggactcagtgtgtgatccggtttctttttgctcgcccctgttttttgtagaatctcttcatgcttgacatacctaccagtattattcccgacgacacatatacatatgagaatataccttatttatttttgtgtaggtgtctgccttcacaaatgtcattgtctactcctagaagaaccaaatacctcaatttttgtttttgagtactgtactatcctgtaaatatatcttaagcaggtttgttttcagcactgatggaaaataccagtgttgggttttttttttagttgccaacagttgtatgtttgctgattatttatgacctgaaataatatatttcttcttctaagaagacattttgttacataaggatgacttttttatacaatggaataaattatggcatttctattgaaaaaaaaaaaaaaaaaagctgggcccctgtgccgaat

SEQ ID NO: 119 - DNA, 1725 bp, Homo sapiens
  misc_feature: Incyte ID No: 128475.1
tgttcttgctagaaagatgaatgcacttcacatgctggatattagagagcacaatggacagagtgcctttcaggtggcagtggctgccaatcagcatctcattgtgcaggatctggtgaacatcggggcacaggtgaacaccacagactgctggggaagaacacctctgcatgtgtgtgctgagaagggccactcccaggtgcttcaggcgattcagaagggagcagtgggaagtaatcagtttgtggatcttgaggcaactaactatgatggcctgactccccttcactgtgcagtcatagcccacaatgctgtggtccatgaactccagagaaatcaacagcctcattcacctgaagttcaggagcttttactgaagaataagagtctggttgataccattaagtgcctaattcaaatgggagcagcggtggaagcgaaggatcgcaaaagtggccgcacagccctgcatttggcagctgaagaagcaaatctggaactcattcgcctctttttggagctgcccagttgcctgtcttttgtgaatgcaaaggcttacaatggcaacactgccctccatgttgctgccagcctgcagtatcggttgacacaattagatgctgtccgcctgttgatgaggaagggagcagacccaagtactcggaacttggagaacgaacagccagtgcatttggttcccgatggccctgtgggagaacagatccgacgtatcctgaagggaaagtccattcagcagagagctccaccgtattagctccattagcttggagcctggctagcaacactcactgtcagttaggcagtcctgatgtatctgtacatagaccatttgccttatattggcaaatgtaagttgtttctatgaaacaaacatatttagttcactattatatagtgggttatattaaaagaaaagaagaaaaatatctaatttctcttggcagatttgcatatttcatacccaggtatctgggatctagacatctgaatttgatctcaatggtaacattgccttcaattaacagtagcttttgagtaggaaaggactttgatttgtggcacaaaacattattaatatagctattgacagtttcaaagcaggtaaattgtaaatgtttctttaagaaaaagcatgtgaaaggaaaaaggtaaatacagcattgaggcttcatttggccttagtccctgggagttactggcgttggacaggcttcagtcattggactagatgaaaggtgtccatggttagaatttgatctttgcaaactgtatataattgttatttttgtccttaaaaatattgtacatacttggttgttaacatggtcatatttgaaatgtataagtccataaaatagaaaagaacaagtgaattgttgctatttaaaaaaattttacaattcttactaaggagtttttattgtgtaatcactaagtctttgtagataaagcagatggggagttacggagttgttcctttactggctgaaagatatattcgaattgtaaagatgctttttctcatgcattgaaattatacattatttgtagggaattgcatgcgaaaaagcatctttacaattcgaatatatctttcagccagtaaaggaacaactccgtaactggctgaaagatatattcgaattgtaaagatgctttttctcatgcattgaaattatacattatttgtagggaattgcatgc

SEQ ID NO: 120 - DNA, 1279 bp, Homo sapiens
  misc_feature: Incyte ID No: 561301CB1
aaggacagcagaggaccagctaagagggagagaagcaactacagaccccccctgaaaacaaccctcagacgccacatcccctgacaagctgccaggcaggttctcttcctctcacatactgacccacggctccaccctctctcccctggaaaggacaccatgagcactgaaagcatgatccgggacgtggagctggccgaggaggcgctccccaagaagacaggggggccccagggctccaggcggtgcttgttcctcagcctcttctccttcctgatcgtggcaggcgccaccacgctcttctgcctgctgcactttggagtgatcggcccccagagggaagagttccccagggacctctctctaatcagccctctggcccaggcagtcagatcatcttctcgaaccccgagtgacaagcctgtagcccatgttgtagcaaaccctcaagctgaggggcagctccagtggctgaaccgccgggccaatgccctcctggccaatggcgtggagctgagagataaccagctggtggtgccatcagagggcctgtacctcatctactcccaggtcctcttcaagggccaaggctgcccctccacccatgtgctcctcacccacaccatcagccgcatcgccgtctcctaccagaccaaggtcaacctcctctctgccatcaagagcccctgccagagggagaccccagagggggctgaggccaagccctggtatgagcccatctatctgggaggggtcttccagctggagaagggtgaccgactcagcgctgagatcaatcggcccgactatctcgactttgccgagtctgggcaggtctactttgggatcattgccctgtgaggaggacgaacatccaaccttcccaaacgcctcccctgccccaatccctttattaccccctccttcagacaccctcaacctcttctggctcaaaaagagaattgggggcttagggtcggaacccaagcttagaactttaagcaacaagaccaccacttcgaaacctgggattcaggaatgtgtggcctgcacagtgaagtgctggcaaccactaagaattcaaactggggcctccagaactcactggggcctacagctttgatccctgacatctggaatctggagaccaggggagcctttggttctggccagaatgctgcaggacttgagaagacctcacctagaaattgacacaagtggaccttaggcctttctctcttcagatgtttcagacttcttgagaaaggagcccagcctc

SEQ ID NO: 121 - DNA, 1983 bp, Homo sapiens
  misc_feature: Incyte ID No: 828082CB1
gcctgagggctataaaaggggtgatgcaacgctctccaagccacagtcgcacgcagccaggcgcgcactgcacagctctcttctctcgccgccgcccgagcgcacccttcagcccgcgcgccggccgtgagtcctcggtgctcgcccgccggccagacaaacagcccgcccgaccccgtcccgaccctggccgccccgagcggagcctggagcaaaatgatgcttcaacacccaggccaggtctctgcctcggaagtgagtgcttctgccatcgtcccctgcctgtcccctcctgggtcactggtgtttgaggattttgctaacctgacgccctttgtcaaggaagagctgaggtttgccatccagaacaagcacctctgccaccggatgtcctctgcgctggaatcagtcactgtcagcgacagacccctcgggtggtccatcacaaaagccgaggtagcccctgaagaagatgaaaggaaaaagaggcgacgagaaagaaataagattgcagctgcaaagtgccgaaacaagaagaaggagaagacggagtgcctgcagaaagagtcggagaagctggaaagtgtgaatgctgaactgaaggctcagattgaggagctcaagaacgagaagcagcatttgatatacatgctcaaccttcatcggcccacgtgtattgtccgggctcagaatgggaggactccagaagatgagagaaacctctttatccaacagataaaagaaggaacattgcagagctaagcagtcgtggtatgggggcgactggggagtcctcattgaatcctcattttatacccaaaaccctgaagccattggagagctgtcttcctgtgtacctctagaatcccagcagcagagaaccatgcaaggcgggagggcctgcagtgattcagcaggcccttcccattctgccccagagtgggtcttggaccaggggcaagtgcatctttgcctcaactccaggatttaggccttaacacactggccattcttatgttccagatggcccccagctggtgtcctgcccgcctttcatctggattctacaaaaaaccaggatgcccaccgttaggattcaggcagcagtgtctgtacctcgggtgggagggatggggccatctccttcaccgtggctaccattgtcactcgtaggggatgtggagtgagaacagcatttagtgaagttgtgcaacggccagggttgtgctttctagcaaatatgctgttatgtccagaaattgtgtgtgcaagaaaactaggcaatgtactcttccgatgtttgtgtcacacaacactgatgtgacttttatatgctttttctcagatctggtttctaagagttttggggggtggggctgtcaccacgtgcagtatctcaagatattcaggtgggccagaagagcttgtcagcaagaggaggacagaattctcccagcgttaacacaaaatccatgggcagcatgatggcaggtcctctgttgcaaactcagttccaaagtcacaggaagaaagcagaaagttcaacttccaaagggttaggactctccactcaatgtcttaggtcaggagttgtgtctaggctggaagagccaaagaatattccattttcctttccttgtggttgaaaaccacagtcagtggagagatgtttggaaaccacagtcagtggagcctgggtggtacccaggctttagcattattggatgtcaatagcattgtttttgtcatgtagctgttttaagaaatctggcccagggtgtttgcagctgtgagaagtcactcacactggccacaaggacgctggctactgtctattaaaattctgatgtttctgtgaaattctcagagtgtttaattgtactcaatggtatcattacaattttctgtaagagaaaatattacttatttatcctagtattcctaacctgtcagaataataaatattggaaccaagacatggta

SEQ ID NO: 122 - DNA, 894 bp, Homo sapiens
  misc_feature: Incyte ID No: 1097190.34
ccagctcgaaattaaccctcactaaaggaacaaaagctgagctccaccgcggtgcgccgctaactataacggtcctttggggtatctgggctccaggcagaagcacagcctccccgacctgccctacgactacggcgccctggaacctcacatcaacgcacatcatgcagctgcaccacagcaagcaccacgcggcctacgtgaacaacctgaacgtcaccgaggagaagtaccaggaggcgttggccaagggagatgttacagcccagatagctcttcagcctgcactgaagttcaatggtggtggtcatatcaatcatagcattttctggacaaacctcagccctaacggtggtggagaacccaaaggggagttgctggaagccatcaaacgtgactttggttcctttgacaagtttaaggagaagctgacggctgcatctgttggtgtccaaggctcaggttggggttggcttggtttcaataaggaacggggacacttacaaattgctgcttgtccaaatcaggatccactgcaaggaacaacaggccttattccactgctggggattgatgtgtgggagcacgcttactaccttcagtataaaaatgtcaggcctgattatctaaaagctatttggaatgtaatcaactgggagaatgtaactgaaagatacatggcttgcaaaaagtaaaccacgatcgttatgctgatcataccctaatgatcccagcaagataatgtcctgtcttctaagatgtgcatcaagcctggtacatactgaaaaccctataaggtcctggataatttttgtttgattattcattgaagaaacatttattttccaattgtgtgaagtttttgactgttaataaaagaatctgtcaaccatc

SEQ ID NO: 123 - DNA, 794 bp, Homo sapiens
  misc_feature: Incyte ID No: 637393CB1
  unsure 7, 14, 22, 35, 37: a, t, c, g, or other
atgtgtnataactnagtcaagntcagtgagcattntnagcacattgcctcaacagcttcaaggtgagccagctcaagactttgctctccaccaggcagaagatgacagactgtgaatttggatatatttacaggctggctcaggactatctgcagtgcgtcctacagataccacaacctggatcaggtccaagcaaaacgtccagagtgctacaaaatgttgcgttctcagtccaaaaagaagtggaaaagaatctgaagtcatgcttggacaatgttaatgttgtgtccgtagacactgccagaacactattcaaccaagtgatggaaaaggagtttgaagacgacatcattaactggggaagaattgtaaccatatttgcatttgaaggtattctcatcaagaaacttctacgacagcaaattgccccggatgtggatacctataaggagatttcatattttgttgcggagttcataatgaataacacaggagaatggataaggcaaaacggaggctgggaaaatggctttgtaaagaagtttgaacctaaatctggctggatgacttttctagaagttacaggaaagatctgtgaaatgctatctctcctgaagcaatactgttgaccagaaaggacactccatattgtgaaaccggcctaatttttctgactgatatggaaacgattgccaacacatacttctacttttaaataaacaactttgatgatgtaacttgaccttccagagttatggaaattttgtccccatgtaatggaataaattgtatgt

SEQ ID NO: 124 - DNA, 1144 bp, Homo sapiens
  misc_feature: Incyte ID No: 191918CB1
gagaatttgtgagcagcccctaacaggctgttacttcactacaactgacgatatgatcatcttaatttacttatttctcttgctatgggaagacactcaaggatggggattcaaggatggaatttttcataactccatatggcttgaacgagcagccggtgtgtaccacagagaagcacggtctggcaaatacaagctcacctacgcagaagctaaggcggtgtgtgaatttgaaggcggccatctcgcaacttacaagcagctagaggcagccagaaaaattggatttcatgtctgtgctgctggatggatggctaagggcagagttggataccccattgtgaagccagggcccaactgtggatttggaaaaactggcattattgattatggaatccgtctcaataggagtgaaagatgggatgcctattgctacaacccacacgcaaaggagtgtggtggcgtctttacagatccaaagcaaatttttaaatctccaggcttcccaaatgagtacgaagataaccaaatctgctactggcacattagactcaagtatggtcagcgtattcacctgagttttttagattttgaccttgaagatgacccaggttgcttggctgattatgttgaaatatatgacagttacgatgatgtccatggctttgtgggaagatactgtggagatgagcttccagatgacatcatcagtacaggaaatgtcatgaccttgaagtttctaagtgatgcttcagtgacagctggaggtttccaaatcaaatatgttgcaatggatcctgtatccaaatccagtcaaggaaaaaatacaagtactacttctactggaaataaaaactttttagctggaagatttagccacttataaaaaaaaaaaaaggatgatcaaaacacacagtgtttatgttggaatcttttggaactcctttgatctcactgttattattaacatttatttattatttttctaaatgtgaaagcaatacataatttagggaaaattggaaaatataggaaactttaaacgagaaaatgaaacctctcataatcccactgcatagaaataacaagcgttaacatttgcatatttttttctttcagtcattttagaatttgtggtatatga

SEQ ID NO: 125 - DNA, 3004 bp, Homo sapiens
  misc_feature: Incyte ID No: 154697CB1
aagagtgcagctgcctgaaccgagccctgccgaacagctgagaattgcactgcaaccatgagtgagaacaataagaattccttggagagcagcctacggcaactaaaatgccatttcacctggaacttgatggagggagaaaactccttggatgattttgaagacaaagtattttaccggactgagtttcagaatcgtgaattcaaagccacaatgtgcaacctactggcctatctaaagcacctcaaagggcaaaacgaggcagccctggaatgcttacgtaaagctgaagagttaatccagcaagagcatgctgaccaggcagaaatcagaagtctggtcacctggggaaactatgcctgggtctactatcacatgggccgactctcagacgttcagatttatgtagacaaggtgaaacatgtctgtgagaagttttccagtccctatagaattgagagtccagagcttgactgtgaggaagggtggacacggttaaagtgtggaggaaaccaaaatgaaagagcgaaggtgtgctttgagaaggctctggaaaagaagccaaagaacccagaattcacctctggactggcaatagcaagctaccgtctggacaactggccaccatctcagaacgccattgaccctctgaggcaagccattcggctgaatcctgacaaccagtaccttaaagtcctcctggctctgaagcttcataagatgcgtgaagaaggtgaagaggaaggtgaaggagagaagttagttgaagaagccttggagaaagccccaggtgtaacagatgtacttcgcagtgcagccaagttttatcgaagaaaagatgagccagacaaagcgattgaactgcttaaaaaggctttagaatacataccaaacaatgcctacctgcattgccaaattgggtgctgctatagggcaaaagtcttccaagtaatgaatctaagagagaatggaatgtatgggaaaagaaagttactggaactaataggacacgctgtggctcatctgaagaaagctgatgaggccaatgataatctcttccgtgtctgttccattcttgccagcctccatgctctagcagatcagtatgaagacgcagagtattacttccaaaaggaattcagtaaagagcttactcctgtagcgaaacaactgctccatctgcggtatggcaactttcagctgtaccaaatgaagtgtgaagacaaggccatccaccactttatagagggtgtaaaaataaaccagaaatcaagggagaaaaaaaagatgaaagacaaactgcaaaaaattgccaaaatgcgactttctaaaaatggagcagattctgaggctttgcatgtcttggcattccttcaggagctgaatgaaaaaatgcaacaagcagatgaagactctgagaggggtttggagtctggaagcctcatcccttcagcatcaagctggaatggggaatgaagaatagagatgtggtgcccactaggctactgctgaaagggagctgaaattcctccaccaagttggtattcaaaatatgtaatgactggtatggcaaaagattggactaagacactggccataccactggacagggttatgttaacacctgaattgctgggtcttgagagagcccaaggagttctgggagagggaccagattggggggtaggtccacgggcttggtgatagaattatttctcgattgacttcttgagtgcaatttgaactgtaacatttgcttagtcacctttagtggagtaatctactgggcttgtttctatatttatataaagcagccaaatccttcatgtaatattgaagtccatttttgcaatgttgttccatacttggagtcattttgcatcccatagaggttagtcctgcatagccagtaatgtgctaagttcatccaaaagctggcggaccaaagtctaaatagggctcagtatcccccatcgcttatctctgcctccttcctcctccttcccagtctatcatcaaccttgagtattctacacaatgtgaattcaagtgcctgattaattgaggtggcaacatagtttgagacgagggcagagaacaggaagatacatagctagaagcgacgggtacaaaaagcaatgtgtacaagaagactttcagcaagtatacagagagttcacctctactctgccctcctcatagtcataatgtagcaagtaaagaatgagaatggattctgtacaatacactagaaaccaacataatgtatttctttaaaacctgtgtgaaaaaataaatgttccaccagtagggataggggaaaagtaaccaaaagagagaaagagaaaggaatgctggtttatctttgtagattgtaatcgaatggagaaatttgcagtattttagccactattaggaattttttttttttgtaaaatgaagactgaactctgttcaaatgctttcatgaacctggtttgagacggtaggaaagcaacaaaacgtgggaacctggtgactaagggcctggtgcaaggacttgggaaatgtcattgataatagatggtggggttttcccccctttagaaatgttggatattaagtgatataaacacttcttttaactccgaaaatcttctgagaaatcacaaaattcacggtatgcttggaacgattgagattttctaggtagatgctgaatagcctagacatcaaagttggtgtgaaccaaaatagagtcagctgacccagcatcagccacactctgggttggaaaatgtttgcctgttggaattaatttaagcttaagtatatatcaacattattttattgtgcaattaaaacaatacaaattcatggttttttaaagttaaaaattctaaccactgtaacaacagtttttgtgttattttctgtattaaacatcttgttgcacgcatttgaggtcatcagggtgcaaaatttgtattcctgaaaatgtcatatattttcattaataaataac

SEQ ID NO: 126 - DNA, 4750 bp, Homo sapiens
  misc_feature: Incyte ID No: 271804.3
gtggggactaccccctctgctcccaaatggggcagcttcctgggtttccgattttctcatttccgtgggtaaaaaaccctgcccccaccgggcttacgcaatttttttaaggggagaggagggaaaaattgtggggggtacgaaaaggcggaaagaaacagtcatttcgtcacatgggcttggttttcagtcttataaaaaggaaggttctctcggttagcgaccaattgtcatacgacttgcagtgagcgtcaggagcacgtccaggaactcctcagcagcgcctccttcagctccacagccagacgccctcagacagcaaagcctacccccgcgccgcgccctgcccgccgctgcgatgctcgcccgcgccctgctgctgtgcgcggtcctggcgctcagccatacagcaaatccttgctgttcccacccatgtcaaaaccgaggtgtatgtatgagtgtgggatttgaccagtataagtgcgattgtacccggacaggattctatggagaaaactgctcaacaccggaatttttgacaagaataaaattatttctgaaacccactccaaacacagtgcactacatacttacccacttcaagggattttggaacgttgtgaataacattcccttccttcgaaatgcaattatgagttatgtgttgacatccagatcacatttgattgacagtccaccaacttacaatgctgactatggctacaaaagctgggaagccttctctaacctctcctattatactagagcccttcctcctgtgcctgatgattgcccgactcccttgggtgtcaaaggtaaaaagcagcttcctgattcaaatgagattgtggaaaaattgcttctaagaagaaagttcatccctgatccccagggctcaaacatgatgtttgcattctttgcccagcacttcacgcatcagtttttcaagacagatcataagcgagggccagctttcaccaacgggctgggccatggggtggacttaaatcatatttacggtgaaactctggctagacagcgtaaactgcgccttttcaaggatggaaaaatgaaatatcagataattgatggagagatgtatcctcccacagtcaaagatactcaggcagagatgatctaccctcctcaagtccctgagcatctacggtttgctgtggggcaggaggtctttggtctggtgcctggtctgatgatgtatgccacaatctggctgcgggaacacaacagagtatgcgatgtgcttaaacaggagcatcctgaatggggtgatgagcagttgttccagacaagcaggctaatactgataggagagactattaagattgtgattgaagattatgtgcaacacttgagtggctatcacttcaaactgaaatttgacccagaactacttttcaacaaacaattccagtaccaaaatcgtattgctgctgaatttaacaccctctatcactggcatccccttctgcctgacacctttcaaattcatgaccagaaatacaactatcaacagtttatctacaacaactctatattgctggaacatggaattacccagtttgttgaatcattcaccaggcaaattgctggcagggttgctggtggtaggaatgttccacccgcagtacagaaagtatcacaggcttccattgaccagagcaggcagatgaaataccagtcttttaatgagtaccgcaaacgctttatgctgaagccctatgaatcatttgaagaacttacaggagaaaaggaaatgtctgcagagttggaagcactctatggtgacatcgatgctgtggagctgtatcctgcccttctggtagaaaagcctcggccagatgccatctttggtgaaaccatggtagaagttggagcaccattctccttgaaaggacttatgggtaatgttatatgttctcctgcctactggaagccaagcacttttggtggagaagtgggttttcaaatcatcaacactgcctcaattcagtctctcatctgcaataacgtgaagggctgtccctttacttcattcagtgttccagatccagagctcattaaaacagtcaccatcaatgcaagttcttcccgctccggactagatgatatcaatcccacagtactactaaaagaacgttcgactgaactgtagaagtctaatgatcatatttatttatttatatgaaccatgtctattaatttaattatttaataatatttatattaaactccttatgttacttaacatcttctgtaacagaagtcagtactcctgttgcggagaaaggagtcatacttgtgaagacttttatgtcactactctaaagattttgctgttgctgttaagtttggaaaacagtttttattctgttttataaaccagagagaaatgagttttgacgtctttttacttgaatttcaacttatattataagaacgaaagtaaagatgtttgaatacttaaacactgtcacaagatggcaaaatgctgaaagtttttacactgtcgatgtttccaatgcatcttccatgatgcattagaagtaactaatgtttgaaattttaaagtacttttggttatttttctgtcatcaaacaaaaacaggtatcagtgcattattaaatgaatatttaaattagacattaccagtaatttcatgtctactttttaaaatcagcaatgaaacaataatttgaaatttctaaattcatagggtagaatcacctgtaaaagcttgtttgatttcttaaagttattaaacttgtacatataccaaaaagaagctgtcttggatttaaatctgtaaaatcagtagaaattttactacaattgcttgttaaaatattttataagtgatgttcctttttcaccaagagtataaacctttttagtgtgactgttaaaacttccttttaaatcaaaatgccaaatttattaaggtggtggagccactgcagtgttatcttaaaataagaatattttgttgagatattccagaatttgtttatatggctggtaacatgtaaaatctatatcagcaaaagggtctacctttaaaataagcaataacaaagaagaaaaccaaattattgttcaaatttaggtttaaacttttgaagcaaacttttttttatccttgtgcactgcaggcctggtactcagattttgctatgaggttaatgaagtaccaagctgtgcttgaataacgatatgttttctcagattttctgttgtacagtttaatttagcagtccatatcacattgcaaaagtagcaatgacctcataaaatacctcttcaaaatgcttaaattcatttcacacattaattttatctcagtcttgaagccaattcagtaggtgcattggaatcaagcctggctacctgcatgctgttccttttcttttcttcttttagccattttgctaagagacacagtcttctcatcacttcgtttctcctattttgttttactagttttaagatcagagttcactttctttggactctgcctatattttcttacctgaacttttgcaagttttcaggtaaacctcagctcaggactgctatttagctcctcttaagaagattaaaagagaaaaaaaaaggcccttttaaaaatagtatacacttattttaagtgaaaagcagagaattttatttatagctaattttagctatctgtaaccaagatggatgcaaagaggctagtgcctcagagagaactgtacggggtttgtgactggaaaaagttacgttcccattctaattaatgccctttcttatttaaaaacaaaaccaaatgatatctaagtagttctcagcaataataataatgacgataatacttcttttccacatctcattgtcactgacatttaatggtactgtatattacttaatttattgaagattattatttatgtcttattaggacactatggttataaactgtgtttaagcctacaatcattgatttttttttgttatgtcacaatcagtatattttctttggggttacctctctgaatattatgtaaacaatccaaagaaatgattgtattaagatttgtgaataaatttttagaaatctgattggcatattgagatatttaaggttgaatgtttgtccttaggataggcctatgtgctagcccacaaagaatattgtctcattagcctgaatgtgccataagactgaccttttaaaatgttttgagggatctgtggatgcttcgttaatttgttcagccacaatttattgagaaaatattctgtgtcaagcactgtgggttttaatatttttaaatcaaacgctgattacagataatagtatttatataaataattgaaaaaaattttcttttgggaagagggagaaaatgaaataaatatcattaaagataactcaggagaatcttctttacaattttacgtttagaatgtttaaggttaagaaagaaatagtcaatatgcttgtataaaacactgttcactgtttttttcaaaaaaaaaacttgatttgttattaacattgatctgctgacaaaacctgggaatttgggttgtgtatgcgaatgtttcagtgcctcagacaaatgtgtatttaacttatgtaaaagataagtctggaaataaatgtctgtttatttttgtactatttaaaaattgacagatcttttctgaagataaactttgattgtttctatacatctttgtcatatg

SEQ ID NO: 127 - DNA, 2188 bp, Homo sapiens
  misc_feature: Incyte ID No: 1453257.6
actttgacaacaaattatattttaaatgtttcatatttacttttatatttccatacaatcagagacagtaaaaaaaatttggagagcacataaaaacatcttaaagttaaaaatataaagccttgtatttaaaaatgcagtcatttaaataatattataagaatctatttgtacataataaacaagtttcaaccagcaagaaattactaatattgactgtggagttttggctgttttaatagttctaactcattattccgtaattcaacacagcactaccaacacagctggcaatgacaagactgggagtatcaaactaggattgtatatttcaattaaaatttcagataaacaataatgtacttatactaaaaaatatataaagtgattatctgaaatgaaaatttaactgggtacccaattgttagtttgtttaatctaaaaaccctgattgaaatttatctaataaaacatcatttaatatctaaaataaaataaatttactataacatctttataactattcaatcaatgattcatcttctatttttccaaattcttgcacaaatatttgatgcttaaataaagacataaacaataaataggttaataagtacacttgaaaattatttatgttatgatgaaaaaacttaaagtgcttccacatgtcctcacaacatcactgtgaggtaagatggtggctaatactttttccacttagaaataaaggagaaaccaaggcacagtggaacaaggacttgtggatcctggctagcagactagggttgccagatttaacagaaaaaaatccaggatttccagctaaatttgactttatggcaaaattcattgtcccatcatttttatttgatgcttcaaatatcacattcaagcaaacccattcaattcctgaaattaaagttcggatattctcttggcccttggcctcaattttgctatttgtatattctcccgtgcaatatctaggaaaatccttatatttaaaaattatttgttgttttttgtaccatgaaatatccagaacatacttatatgtaaagtattatttatttgaatctacaaaaaacaacaaataatttttaaatataaggattttcctagatattgcacgggagaatatacaaatagcaaaattgaggccaagggccaagagaatatccgaactttaatttcaggaattgaatgggtttgctagaatgtgatatttgaagcatcacataaaaatgatgggacaataaattttgccataaagtcaaatttagctggaaatcctggatttttttctgttaaatctggcaaccctagtctgctagccaggatccacaagtccttgttccactgtgccttggtttctcctttatttctaagtggaaaaagtattagccaccatcttacctcacagtgatgttgtgaggacatgtggaagcactttaagttttttcatcataacataaattattttcaagtgtaacttattaacctatttattatttatgtatttatttaagcatcaaatatttgtgcaagaatttggaaaaatagaagatgaatcattgattgaatagttataaagatgttatagtaaatttattttattttagatattaaatgatgttttattagataaatttcaatcagggtttttagattaaacaaacaaacaattgggtacccagttaaattttcatttcagatatacaacaaataattttttagtataagtacattattgtttatctgaaattttaattgaactaacaatcctagtttgatactcccagtcttgtcattgccagctgtgttggtagtgctgtgttgaattacggaataatgagttagaactattaaaacagccaaaactccacagtcaatattagtaatttcttgctggttgaaacttgtttattatgtacaaatagattcttataatattatttaaatgactgcatttttaaatacaaggctttatatttttaactttaagatgtttttatgtgctctccaaattttttttactgtttctgattgtatggaaatataaaagtaaatatgtttcatatttacttttatatttccatacaatcagaaacagtaaaagtaaatatgaaacatttaaaatataatttgttgtcaaagtaaaaaaagagaaaaaaaaactcgggggggg

SEQ ID NO: 128 - protein, 611 aa, Homo sapiens
  misc_feature: Incyte ID No: 1400053CD1
MPEIVDTCSLASPASVCRTKHLHLRCSVDFTRRTLTGTAALTVQSQEDNLRTLVLDTKDLTIEKVVINGQEVKYALGERQSYKGSPMEISLPIALSKNQEIVIEISFETSPKSSALQWLTPEQTSGKEHPYLFSQCQAIHCRAILPCQDTPSVKLTYTAEVSVPKELVALMSAIRDGETPDPEDPSRKIYKFIQKVPIPCYLIALVVGALESRQIGPRTLVWSEKEQVEKSAYEFSETESMLKIAEDLGGPYVWGQYDLLVLPPSFPYGGMENPCLTFVTPTLLAGDKSLSNVIAHEISHSWTGNLVTNKTWDHFWLNEGHTVYLERHICGRLFGEKFRHFNALGGWGELQNSVKTFGETHPFTKLVVDLTDIDPDVAYSSVPYEKGFALLFYLEQLLGGPEIFLGFLKAYVEKFSYKSITTDDWKDFLYSYFKDKVDVLNQVDWNAWLYSPGLPPIKPNYDMTLTNACIALSQRWITAKEDDLNSFNATDLKDLSSHQLNEFLAQTLQRAPLPLGHIKRMQEVYNFNAINNSEIRFRWLRLCIQSKWEDAIPLALKMATEQGRMKFTRPLFKDLAAFDKSHDQAVRTYQEHKASMHPVTAMLVGKDLKVD

SEQ ID NO: 129 - protein, 364 aa, Homo sapiens
  misc_feature: Incyte ID No: 2874030CD1
MPLLLLLPLLWAGALAMDPNFWLQVQESVTVQEGLCVLVPCTFFHPIPYYDKNSPVHGYWFREGAIISGDSPVATNKLDQEVQEETQGRFRLLGDPSRNNCSLSIVDARRRDNGSYFFRMERGSTKYSYKSPQLSVHVTDLTHRPKILIPGTLEPGHSKNLTCSVSWACEQGTPPIFSWLSAAPTSLGPRTTHSSVLIITPRPQDHGTNLTCQVKFAGAGVTTERTIQLNVTYVPQNPTTGIFPGDGSGKQETRAGVVHGAIGGAGVTALLALCLCLIFFIVKTHRRKAARTAVGRNDTHPTTGSASPKHQKKSKLHGPTETSSCSGAAPTVEMDEELHYASLNFHGMNPSKDTSTEYSEVRTQ

SEQ ID NO: 130 - protein, 637 aa, Homo sapiens
  misc_feature: Incyte ID No: 2049950CD1
MGLLSQGSPLSWEETKRHADHVRRHGILQFLHIYHAVKDRHKDVLKWGDEVEYMLVSFDHENKKVRLVLSGEKVLETLQEKGERTNPNHPTLWRPEYGSYMIEGTPGQPYGGTMSEFNTVEANMRKRRKEATSILEENQALCTITSFPRLGCPGFTLPEVKPNPVEGGASKSLFFPDEAINKHPRFSTLTRNIRHRRGEKVVINVPIFKDKNTPSPFIETFTEDDEASRASKPDHIYMDAMGFGMGNCCLQVTFQACSISEARYLYDQLATICPIVMALSAASPFYRGYVSDIDCRWGVISASVDDRTREERGLEPLKNNNYRISKSRYDSIDSYLSKCGEKYNDIDLTIDKEIYEQLLQEGIDHLLAQHVAHLFIRDPLTLFEEKIHLDDANESDHFENIQSTNWQTMRFKPPPPNSDIGWRVEFRPMEVQLTDFENSAYVVFVVLLTRVILSYKLDFLIPLSKVDENMKVAQKRDAVLQGMFYFRKDICKGGNAVVDGCGKAQNSTELAAEEYTLMSIDTIINGKEGVFPGLIPILNSYLENMEVDVDTRCSILNYLKLIKKRASGELMTVARWMREFIANHPDYKQDSVITDEMNYSLILKCNQIANELCECPELLGSAFRKVKYSGSKTDSSN

SEQ ID NO: 131 - protein, 318 aa, Homo sapiens
  misc_feature: Incyte ID No: 3257507CD1
MPKRGKKGAVAEDGDELRTEPEAKKSKTAAKKNDKEAAGEGPALYEDPPDQKTSPSGKPATLKICSWNVDGLRAWIKKKGLDWVKEEAPDILCLQETKCSENKLPAELQELPGLSHQYWSAPSDKEGYSGVGLLSRQCPLKVSYGIGDEEHDQEGRVIVAEFDSFVLVTAYVPNAGRGLVRLEYRQRWDEAFRKFLKGLASRKPLVLCGDLNVAHEEIDLRNPKGNKKNAGFTPQERQGFGELLQAVPLADSFRHLYPNTPYAYTFWTYMMNARSKNVGWRLDYFLLSHSLLPALCDSKIRSKALGSDHCPITLYLAL

SEQ ID NO: 132 - protein, 203 aa, Homo sapiens
  misc_feature: Incyte ID No: 2676869CD1
MARPRPREYKAGDLVFAKMKGYPHWPARIDELPEGAVKPPANKYPIFFFGTHETAFLGPKDLFPYKEYKDKFGKSNKRKGFNEGLWEIENNPGVKFTGYQAIQQQSSSETEGEGGNTADASSEEEGDRVEEDGKGKRKNEKAGSKRKKSYTSKKSSKQSRKSPGDEDDKDCKEEENKSSSEGGDAGNDTRNTTSDLQKTSEGT

SEQ ID NO: 133 - protein, 147 aa, Homo sapiens
  misc_feature: Incyte ID No: 672615CD1
MAGNSILLAAVSILSACQQSYFALQVGKARLKYKVTPPAVTGSPEFERVFRAQQNCVEFYPIFIITLWMAGWYFNQVFATCLGLVYIYGRHLYFWGYSEAAKKRITGFRLSLGILALLTLLGALGIANSFLDEYLDLNIAKKLRRQF

SEQ ID NO: 134 - protein, 261 aa, Homo sapiens
  misc_feature: Incyte ID No: 2616727CD1
MNPNCARCGKIVYPTEKVNCLDKFWHKACFHCETCKMTLNMKNYKGYEKKPYCNAHYPKQSFTMVADTPENLRLKQQSELQSQVRYKEEFEKNKGKGFSVVADTPELQRIKKTQDQISNIKYHEEFEKSRMGPSGGEGMEPERRDSQDGSSYRRPLEQQQPHHIPTSAPVYQQPQQQPVAQSYGGYKEPAAPVSIQRSAPGGGGKRYRAVYDYSAADEDEVSFQDGDTIVNVQQIDDGWMYGTVERTGDTGMLPANYVEAI

SEQ ID NO: 135 - protein, 663 aa, Homo sapiens
  misc_feature: Incyte ID No: 1354395CD1
MSWLSSSQGVVLTAYHPSGKDQTVGNSHAKAGEEATSSRRYGQYTMNQESTTIKVMEKPPFDRSISQDSLDELSMENYWIELENIKKSSENSQEDQEVVVVKEPDEGELEEEWLKEAGLSNLFGESAGDPQESIVFLSTLTRTQAAAVQKRVETVSQTLRKKNKQYQIPDVRDIFAQQRESKETAPGGTESQSLRTNENKYQGRDDEASNLVGEEKLIPPEETPAPETDINLEVSFAEQALNQKESSKEKIQKSKGDDATLPSFRLPKDKTGTTRIGDLAPQDMKKVCHLALIELTALYDVLGIELKQQKAVKIKTKDSGLFCVPLTALLEQDQRKVPGMRIPLIFQKLISRIEERGLETEGLLRIPGAAIRIKNLCQELEAKFYEGTFNWESVKQHDAASLLKLFIRELPQPLLSVEYLKAFQAVQNLPTKKQQLQALNLLVILLPDANRDTLKALLEFLQRVIDNKEKNKMTVMNVAMVMAPNLFMCHALGLKSSEQREFVMAAGTANTMHLLIKYQKLLWTIPKFIVNQVRKQNTENHKKDKRAMKKLLKKMAYDREKYEKQDKSTNDADVPQGVIRVQAPHLSKVSMAIQLTEELKASDVLARFLSQESGVAQTLKKGEVFLYEIGGNIGERCLDDDTYMKDLYQLNPNAEWVIKSKPL

SEQ ID NO: 136 - protein, 381 aa, Homo sapiens
  misc_feature: Incyte ID No: 1966280CD1
MHLLAILFCALWSAVLAENSDDYDLMYVNLDNEIDNGLHPTEDPTPCDCGQEHSEWDKLFIMLENSQMRERMLLQATDDVLRGELQRLREELGRLAESLARPCAPGAPAEARLTSALDELLQATRDAGRRLARMEGAEAQRPEEAGRALAAVLEELRQTRADLHAVQGWAARSWLPAGCETAILFPMRSKKIFGSVHPVRPMRLESFSACIWVKATDVLNKTILFSYGTKRNPYEIQLYLSYQSIVFVVGGEENKLVAEAMVSLGRWTHLCGTWNSEEGLTSLWVNGELAATTVEMATGHIVPEGGILQIGQEKNGCCVGGGFDETLAFSGRLTGFNIWDSVLSNEEIRETGGAESCHIRGNIVGWGVTEIQPHGGAQYVS

SEQ ID NO: 137 - protein, 827 aa, Homo sapiens
  misc_feature: Incyte ID No: 1250434CD1
MEGAGGANDKKNRISSERRKEKSRDAARSRRSKESEVFYELAHQLPLPHNVSSHLDKASVMRLTISYLRVRKLLDAGDLDIEDDMKAQMNCFYLKALDGFVMVLTDDGDMIYISDNVNKYMGLTQFELTGHSVFDFTHPCDHEEMREMLTHRNGLVKKGKEQNTQRSFFLRMKCTLTSRGRTMNIKSATWKVLHCTGHIHVYDTNSNQPQCGYKKPPMTCLVLICEPIPHPSNIEIPLDSKTFLSRHSLDMKFSYCDERITELMGYEPEELLGRSIYEYYHALDSDHLTKTHHDMFTKGQVTTGQYRMLAKRGGYVWVETQATVIYNTKNSQPQCIVCVNYVVSGIIQHDLIFSLQQTECVLKPVESSDMKMTQLFTKVESEDTSSLFDKLKKEPDALTLLAPAAGDTIISLDFGSNDTETDDQQLEEVPLYNDVMLPSPNEKLQNINLAMSPLPTAETPKPLRSSADPALNQEVALKLEPNPESLELSFTMPQIQDQTPSPSDGSTRQSSPEPNSPSEYCFYVDSDMVNEFKLELVEKLFAEDTEAKNPFSTQDTDLDLEMLAPYIPMDDDFQLRSFDQLSPLESSSASPESASPQSTVTVFQQTQIQEPTANATTTTATTDELKTVTKDRMEDIKILIASPSPTHIHKETTSATSSPYRDTQSRTASPNRAGKGVIEQTEKSHPRSPNVLSVALSQRTTVPEEELNPKILALQNAQRKRKMEHDGSLFQAVGIGTLLQQPDDHAATTSLSWKRVKGCKSSEQNGMEQKTIILIPSDLACRLLGQSMDESGLPQLTSYDCEVNAPIQGSRNLLQGEELLRALDQVN

SEQ ID NO: 138 - protein, 171 aa, Homo sapiens
  misc_feature: Incyte ID No: 342012CD1
MHPFYTRAATMIGEIAAAVSFISKFLRTKGLTSERQLQTFSQSLQELLAEHYKHHWFPEKPCKGSGYRCIRINHKMDPLIGQAAQRIGLSSQELFRLLPSELTLWVDPYEVSYRIGEDGSICVLYEASPAGGSTQNSTNVQMVDSRISCKEELLLGRTSPSKNYNMMTVSG

SEQ ID NO: 139 - protein, 968 aa, Homo sapiens
  misc_feature: Incyte ID No: 1438184CD1
MAEDDPYLGRPEQMFHLDPSLTHTIFNPEVFQPQMALPTDGPYLQILEQPKQRGFRFRYVCEGPSHGGLPGASSEKNKKSYPQVKICNYVGPAKVIVQLVTNGKNIHLHAHSLVGKHCEDGICTVTAGPKDMVVGFANLGILHVTKKKVFETLEARMTEACIRGYNPGLLVHPDLAYLQAEGGGDRQLGDREKELIRQAALQQTKEMDLSVVRLMFTAFLPDSTGSFTRRLEPVVSDAIYDSKAPNASNLKIVRMDRTAGCVTGGEEIYLLCDKVQKDDIQIRFYEEEENGGVWEGFGDFSPTDVHRQFAIVFKTPKYKDINITKPASVFVQLRRKSDLETSEPKPFLYYPEIKDKEEVQRKRQKLMPNFSDSFGGGSGAGAGGGGMFGSGGGGGGTGSTGPGYSFPHYGFPTYGGITFHPGTTKSNAGMKHGTMDTESKKDPEGCDKSDDKNTVNLFGKVIETTEQDQEPSEATVGNGEVTLTYATGTKEESAGVQDNLFLEKAMQLAKRHANALFDYAVTGDVKMLLAVQRHLTAVQDENGDSVLHLAIIHLHSQLVRDLLEVTSGLISDDIINMRNDLYQTPLHLAVITKQEDVVEDLLRAGADLSLLDRLGNSVLHLAAKEGHDKVLSILLKHKKAALLLDHPNGDGLNAIHLAMMSNSLPCLLLLVAAGADVNAQEQKSGRTALHLAVEHDNISLAGCLLLEGDAHVDSTTYDGTTPLHIAAGRGSTRLAALLKAAGADPLVENFEPLYDLDDSWENAGEDEGVVPGTTPLDMATSWQVFDILNGKPYEPEFTSDDLLAQGDMKQLAEDVKLQLYKLLEIPDPDKNWATLAQKLGLGILNNAFRLSPAPSKTLMDNYEVSGGTVRELVEALRQMGYTEAIEVIQAASSPVKTTSQAHSLPLSPASTRQQIDELRDSDSVCDSGVETSFRKLSFTESLTSGASLLTLNKMPHDYGQEGPLEGKI

SEQ ID NO: 140 - protein, 426 aa, Homo sapiens
  misc_feature: Incyte ID No: 1450758CD1
MAIAQLATEYVFSDFLLKEPTEPKFKGLRLELAVDKMVTCIAVGLPLLLISLAFAQEISIGTQISCFSPSSFSWRQAAFVDSYCWAAVQQKNSLQSESGNLPLWLHKFFPYILLLFAILLYLPPLFWRFAAAPHICSDLKFIMEELDKVYNRAIKAAKSARDLDMRDGACSVPGVTENLGQSLWEVSESHFKYPIVEQYLKTKKNSNNLIIKYISCRLLTLIIILLACIYLGYYFSLSSLSDEFVCSIKSGILRNDSTVPDQFQCKLIAVGIFQLLSVINLVVYVLLAPVVVYTLFVPFRQKTDVLKVYEILPTFDVLHFKSEGYNDLSLYNLFLEENISEVKSYKCLKVLENIKSSGQGIDPMLLLTNLGMIKMDVVDGKTPMSAEMREEQGNQTAELQGMNIDSETKANNGEKNARQRLLDSSC

SEQ ID NO: 141 - protein, 177 aa, Homo sapiens
  misc_feature: Incyte ID No: 1841778CD1
MEICRGLRSHLITLLLFLFHSETICRPSGRKSSKMQAFRIWDVNQKTFYLRNNQLVAGYLQGPNVNLEEKIDVVPIEPHALFLGIHGGKMCLSCVKSGDETRLQLEAVNITDLSENRKQDKRFAFIRSDSGPTTSFESAACPGWFLCTAMEADQPVSLTNMPDEGVMVTKFYFQEDE

SEQ ID NO: 142 - protein, 491 aa, Homo sapiens [sequence omitted]

SEQ ID NO: 143 - protein, 350 aa, Homo sapiens [sequence omitted]

SEQ ID NO: 144 - protein, 271 aa, Homo sapiens
  misc_feature: Incyte ID No: 2483854CD1
MAKVPDMFEDLKNCYSENEEDSSSIDHLSLNQKSFYHVSYGPLHEGCMDQSVSLSISETSKTSKLTFKESMVVVATNGKVLKKRRLSLSQSITDDDLEAIANDSEEEIIKPRSAPFSFLSNVKYNFMRIIKYEFILNDALNQSIIRANDQYLTAAALHNLDEAVKFDMGAYKSSKDDAKITVILRISKTQLYVTAQDEDQPVLLKEMPEIPKTITGSETNLLFFWETHGTKNYFTSVAHPNLFIATKQDYWVCLAGGPPSITDFQILENQA

SEQ ID NO: 145 - protein, 350 aa, Homo sapiens
  misc_feature: Incyte ID No: 1842870CD1
MFGLKRNAVIGLNLYCGGAGLGAGSGGATRPGGRLLATEKEASARREIGGGEAGAVIGGSAGASPPSTLTPDSRRFARPPPIGAEVPDVTATPARLLFFAPTRRAAPLEEMEAPAADAIMSPEEELDGYEPEPLGKRPAVLPLLELVGESGNNTSTDGSLPSTPPPAEEEEDELYRQSLEIISRYLREQATGAKDTKPMGRSGATSRKALETLRRVGDGVQRNHETAFQGMLRKLDIKNEDDVKSLSRVMIHVFSDGVTNWGRIVTLISFGAFVAKHLKTINQESCIEPLAESITDVLVRTKRDWLVKQRGWDGFVEFFHVEDLEGGIRNVLLAFAGVAGVGAGLAYLIR

SEQ ID NO: 146 - protein, 530 aa, Homo sapiens
  misc_feature: Incyte ID No: 156986CD1
MAKGEGAESGSAAGLLPTSILQSTERPAQVKKEPKKKKQQLSVCNKLCYALGGAPYQVTGCALGFFLQIYLLDVAQVGPFSASIILFVGRAWDAITDPLVGLCISKSPWTCLGRLMPWIIFSTPLAVIAYFLIWFVPDFPHGQTYWYLLFYCLFETMVTCFHVPYSALTMFISTEQTERDSATAYRMTVEVLGTVLGTAIQGQIVGQADTPCFQDLNSSTVASQSANHTHGTTSHRETQKAYLLAAGVIVCIYIICAVILILGVREQREPYEAQQSEPIAYFRGLRLVMSHGPYIKLITGFLFTSLAFMLVEGNFVLFCTYTLGFRNEFQNLLLAIMLSATLTIPIWQWFLTRFGKKTAVYVGISSAVPFLILVALMESNLIITYAVAVAAGISVAAAFLLPWSMLPDVIDDFHLKQPHFHGTEPIFFSFYVFFTKFASGVSLGISTLSLDFAGYQTRGCSQPERVKFTLNMLVTMAPIVLILLGLLLFKMYPIDEERRRQNKKALQALRDEASSSGCSETDSTELASIL

SEQ ID NO: 147 - protein, 103 aa, Homo sapiens
  misc_feature: Incyte ID No: 3732868CD1
METVQELIPLAKEMMAQKRKGKMVKLYVLGSVLALFGVVLGLMETVCSPFTAARRLRDQEAAVAELQAALERQALQKQALQEKGKQQDTVLGGRALSNRQHAS

SEQ ID NO: 148 - protein, 425 aa, Homo sapiens
  misc_feature: Incyte ID No: 1528186CD1
MDKNIGEQLNKAYEAFRQACMDRDSAVKELQQKTENYEQRIREQQEQLSLQQTIIDKLKSQLLLVNSTQDNNYGCVPLLEDSETRKNNLTLDQPQDKVISGIAREKLPKVRRQEVSSPRKETSARSLGSPLLHERGNIEKTFWDLKEEFHKICMLAKAQKDHLSKLNIPDTATETQCSVPIQCTDKTDKQEALFKPQAKDDINRGAPSITSVTPRGLCRDEEDTSFESLSKFNVKFPPMDNDSTFLHSTPERPGILSPATSEAVCQEKFNMEFRDNPGNFVKTEETLFEIQGIDPIASAIQNLKTTDKTKPSNLVNTCIRTTLDRAACLPPGDHNALYVNSFPLLDPSDAPFPSLDSPGKAIRGPQQPIWKPFPNQDSDSVVLSGTDSELHIPRVCEFCQAVFPPSITSRGDFLRHLNSHFNGET

SEQ ID NO: 149 - protein, 431 aa, Homo sapiens
  misc_feature: Incyte ID No: 1453334CD1
MRALLARLLLCVLVVSDSKGSNELHQVPSNCDCLNGGTCVSNKYFSNIHWCNCPKKFGGQHCEIDKSKTCYEGNGHFYRGKASTDTMGRPCLPWNSATVLQQTYHAHRSDALQLGMGKHNYCRNPDNRRRPWCYVQVGLKPLVQECMVHDCADGKKPSSPPEELKFQCGQKTLRPRFKIIGGEFTTIENQPWFAAIYRRHRGGSVTYVCGGSLISPCWVISATHCFIDYPKKEDYIVYLGRSRLNSNTQGEMKFEVENLILHKDYSADTLAHHNDIALLKIRSKEGRCAQPSRTIQTICLPSMYNDPQFGTSCEITGFGKENSTDYLYPEQLKMTVVKLISHRECQQPHYYGSEVTTKMLCAADPQWKTDSCQGDSGGPLVCSLQGRMTLTGIVSWGRGCALKDKPGVYTRVSHFLPWIRSHTKEENGLAL

SEQ ID NO: 150 - protein, 326 aa, Homo sapiens
  misc_feature: Incyte ID No: 779175CD1
MYQDYPGNFDTSSRGSSGSPAHAESYSSGGGGQQKFRVDMPGSGSAFIPTINAITTSQDLQWMVQPTVITSMSNPYPRSHPYSPLPGLASVPGHMALPRPGVIKTIGTTVGRRRRDEQLSPEEEEKRRIRRERNKLAAAKCRNRRRELTEKLQAETEELEEEKSGLQKEIAELQKEKEKLEFMLVAHGPVCKISPEERRSPPAPGLQPMRSGGGSVGAVVVKQEPLEEDSPSSSSAGLDKAQRSVIKPISIAGGFYGEEPLHTPIVVTSTPAVTPGTSNLVFTYPSVLEQESPASPSESCSKAHRRSSSSGDQSSDSLNSPTLLAL

SEQ ID NO: 151 - protein, 291 aa, Homo sapiens
  misc_feature: Incyte ID No: 3072333CD1
MQRARPTLWAAALTLLVLLRGPPVARAGASSGGLGPVVRCEPCDARALAQCAPPPAVCAELVREPGCGCCLTCALSEGQPCGIYTERCGSGLRCQPSPDEARPLQALLDGRGLCVNASAVSRLRAYLLPAPPAPGNASESEEDRSAGSVESPSVSSTHRVSDPKFHPLHSKIIIIKKGHAKDSQRYKVDYESQSTDTQNFSSESKRETEYGPCRREMEDTLNHLKFLNVLSPRGVHIPNCDKKGFYKKKQCRPSKGRKRGFCWCVDKYGQPLPGYTTKGKEDVHCYSMQSK

SEQ ID NO: 152 - protein, 277 aa, Homo sapiens
  misc_feature: Incyte ID No: 1452055CD1
MVRLPLQCVLWGCLLTAVHPEPPTACREKQYLINSQCCSLCQPGQKLVSDCTEFTETECLPCGESEFLDTWNRETHCHQHKYCDPNLGLRVQQKGTSETDTICTCEEGWHCTSEACESCVLHGSCSPGFGVKQIATGVSDTICEPCPVGFFSNVSSAFEKCHPWTSCETKDLVVQQAGTNKTDVVCGPQDRLRALVVIPIIFGILFAILLVLVFIKKVAKKPTNKAPHPKQEPQEINFPDDLPGSNTAAPVQETLHGCQPVTQEDGKESRISVQERQ

SEQ ID NO: 153 - protein, 226 aa, Homo sapiens
  misc_feature: Incyte ID No: 1518310CD1
MDWGTLQTILGGVNKHSTSIGKIWLTVLFIFRIMILVVAAKEVWGDEQADFVCNTLQPGCKNVCYDHYFPISHIRLWALQLIFVSTPALLVAMHVAYRRHEKKRKFIKGEIKSEFKDIEEIKTQKVRIEGSLWWTYTSSIFFRVIFEAAFMYVFYVMYDGFSMQRLVKCNAWPCPNTVDCFVSRPTEKTVFTVFMIAVSGICILLNVTELCYLLIRYCSGKSKKPV

SEQ ID NO: 154 - protein, 80 aa, Homo sapiens
  misc_feature: Incyte ID No: 2303994CD1
MNSIFFLSLCLPLWVSLLWAKPLEMHKTSRHGFWQKLHDFKLALLLLTFHREKIFPLKKTGLVIFSLVALSRDISALHYT

SEQ ID NO: 155 - protein, 59 aa, Homo sapiens
  misc_feature: Incyte ID No: 1554082CD1
MEFSTLFSLLLIMLLKFSLVKHLENKNKKNVICFCLQNLIRIFSLEEDFPLLLHKILTP

SEQ ID NO: 156 - protein, 1531 aa, Homo sapiens
  misc_feature: Incyte ID No: 5185743CD1
MPSDFISLLSADLDLESPKSLYSRESVYDLLPKELQLPPSRETSVASMSQTSGGEAGSPPPAVVAADASSAPSSSSMGGACSSFTTSSSPTIYSTSVTDSKAMQVESCSSAVGVSNRGVSEKQLTSNTVQQHPSTPKRHTVLYISPPPEDLLDNSRMSCQDEGCGLESEQSCSMWMEDSPSNFSNMSTSSYNDNTEVPRKSRKRNPKQRPGVKRRDCEESNMDIFDADSAKAPHYVLSQLTTDNKGNSKAGNGTLENQKGTGVKKSPMLCGQYPVKSEGKELKIVVQPETQHRARYLTEGSRGSVKDRTQQGFPTVKLEGHNEPVVLQVFVGNDSGRVKPHGFYQACRVTGRNTTPCKEVDIEGTTVIEVGLDPSNNMTLAVDCVGILKLRNADVEARIGIAGSKKKSTRARLVFRVNIMRKDGSTLTLQTPSSPILCTQPAGVPEILKKSLHSCSVKGEEEVFLIGKNFLKGTKVIFQENVSDENSWKSEAEIDMELFHQNHLIVKVPPYHDQHITLPVSVGIYVVTNAGRSHDVQPFTYTPDPAAAGALNVNVKKEISSPARPCSFEEAMKAMKTTGCNLDKVNIIPNALMTPLIPSSMIKSEDVTPMEVTAEKRSSTIFKTTKSVGSTQQTLENISNIAGNGSFSSPSSSHLPSENEKQQQIQPKAYNPETLTTIQTQDISQPGTFPAVSASSQLPNSDALLQQATQFQTRETQSREILQSDGTVVNLSQLTEASQQQQQSPLQEQAQTLQQQISSNIFPSPNSVSQLQNTIQQLQAGSFTGSTASGSSGSVDLVQQVLEAQQQLSSVLFSAPDGNENVQEQLSADIFQQVSQIQSGVSPGMFSSTEPTVHTRPDNLLPGRAESVHPQSENTLSNQQQQQQQQQQVMESSAAMVMEMQQSICQAAAQIQSELFPSTASANGNLQQSPVYQQTSHMMSALSTNEDMQMQCELFSSPPAVSGNETSTTTTQQVATPGTTMFQTSSSGDGEETGTQAKQIQNSVFQTMVQMQHSGDNQPQVNLFSSTKSMMSVQNSGTQQQGNGLFQQGNEMMSLQSGNFLQQSSHSQAQLFHPQNPIADAQNLSQETQGSLFHSPNPIVHSQTSTTSSEQMQPPMFHSQSTIAVLQGSSVPQDQQSTNIFLSQSPMNNLQTNTVAQEAFFAAPNSISPLQSTSNSEQQAAFQQQAPISHIQTPMLSQEQAQPPQQGLFQPQVALGSLPPNPMPQSQQGTMFQSQHSIVAMQSNSPSQEQQQQQQQQQQQQQQQQQSILFSNQNTMATMASPKQPPPNMIFNPNQNPMANQEQQNQSIFHQQSNMAPMNQEQQPMQFQSQSTVSSLQNPGPTQSESSQTPLFHSSPQIQLVQGSPSSQEQQVTLFLSPASMSALQTSINQQDMQQSPLYSPQNNMPGIQGATSSPQPQATLFHNTAGGTMNQLQNSPGSSQQTSGMFLFGIQNNCSQLLTSGPATLPDQLMAISQPGQPQNEGQPPVTTLLSQQMPENSPLASSINTNQNIEKIDLLVSLQNQGNNLTGSF

SEQ ID NO: 157 - protein, 1212 aa, Homo sapiens
  misc_feature: Incyte ID No: 4436929CD1
MANDSPAKSLVDIDLSSLRDPAGIFELVEVVGNGTYGQVYKGRHVKTGQLAAIKVMDVTEDEEEEIKLEINMLKKYSHHRNIATYYGAFIKKSPPGHDDQLWLVMEFCGAGSITDLVKNTKGNTLKEDWIAYISREILRGLAHLHIHHVIHRDIKGQNVLLTENAEVKLVDFGVSAQLDRTVGRRNTFIGTPYWMAPEVIACDENPDATYDYRSDLWSCGITAIEMAEGAPPLCDMHPMRALFLIPRNPPPRLKSKKWSKKFFSFIEGCLVKNYMQRPSTEQLLKHPFIRDQPNERQVRIQLKDHIDRTRKKRGEKDETEYEYSGSEEEEEEVPEQEGEPSSIVNVPGESTLRRDFLRLQQENKERSEALRRQQLLQEQQLREQEEYKRQLLAERQKRIEQQKEQRRRLEEQQRREREARRQQEREQRRREQEEKRRLEELERRRKEEEERRRAEEEKRRVEREQEYIRRQLEEEQRHLEVLQQQLLQEQAMLLHDHRRPHPQHSQQPPPPQQERSKPSFHAPEPKAHYEPADRAREVEDRFRKTNHSSPEAQSKQTGRVLEPPVPSRSESFSNGNSESVHPALQRPAEPQVPVRTTSRSPVLSRRDSPLQGSGQQNSQAGQRNSTSSIEPRLLWERVEKLVPRPGSGSSSGSSNSGSQPGSHPGSQSGSGERFRVRSSSKSEGSPSQRLENAVKKPEDKKEVFRPLKPAGEVDLTALAKELRAVEDVRPPHKVTDYSSSSEESGTTDEEDDDVEQEGADESTSGPEDTRAASSLNLSNGETESVKTMIVHDDVESEPAMTPSKEGTLIVRQTQSASSTLQKHKSSSSFTPFIDPRLLQISPSSGTTVTSVVGFSCDGMRPEAIRQDPTRKGSVVNVNPTNTRPQSDTPEIRKYKKRFNSEILCAALWGVNLLVGTESGLMLLDRSGQGKVYPLINRRRFQQMDVLEGLNVLVTISGKKDKLRVYYLSWLRNKILHNDPEVEKKQGWTTVGDLEGCVHYKVVKYERIKFLVIALKSSVEVYAWAPKPYHKFMAFKSFGELVHKPLLVDLTVEEGQRLKVIYGSCAGFHAVDVDSGSVYDIYLPTHIQCSIKPHAIIILPNTDGMELLVCYEDEGVYVNTYGRITKDVVLQWGEMPTSVAYIRSNQTMGWGEKAIEIRSVETGHLDGVFMHKRAQRLKFLCERNDKVFFASVRSGGSSQVYFMTLGRTSLLSW

SEQ ID NO: 158 - protein, 109 aa, Homo sapiens
  misc_feature: Incyte ID No: 020293CD1
MKFISTSLLLMLLVSSLSPVQGVLEVYYTSLRCRCVQESSVFIPRRFIDRIQILPRGNGCPRKEIIVWKKNKSIVCVDPQAEWIQRMMEVLRKRSSSTLPVPVFKRKIP

SEQ ID NO: 159 - protein, 152 aa, Homo sapiens
  misc_feature: Incyte ID No: 135626CD1
MDQHRGFLHNQAKNLLCGFYGRHAELRFLDLVPSLQLDPAQIYRVTWFISWSPCFSWGCAGEVRAFLQENTHVRLRIFAARIYDYDPLYKEALQMLRDAGAQVSIMTYDEFEYCWDTFVYRQGCPFQPWDGLEEHSQALSGRLRAILQNQGN

SEQ ID NO: 160 - protein, 459 aa, Homo sapiens [sequence omitted]

SEQ ID NO: 161 - protein, 465 aa, Homo sapiens
  misc_feature: Incyte ID No: 2875023CD1
MEPSSLELPADTVQRIAAELKCHPTDERVALHLDEEDKLRHFRECFYIPKIQDLPPVDLSLVNKDENAIYFLGNSLGLQPKMVKTYLEEELDKWAKIAAYGHEVGKRPWITGDESIVGLMKDIVGANEKEIALMNALTVNLHLLMLSFFKPTPKRYKILLEAKAFPSDHYAIESQLQLHGLNIEESMRMIKPREGEETLRIEDILEVIEKEGDSIAVILFSGVHFYTGQHFNIPAITKAGQAKGCYVGFDLAHAVGNVELYLHDWGVDFACWCSYKYLNAGAGGIAGAFIHEKHAHTIKPALVGWFGHELSTRFKMDNKLQLIPGVCGFRISNPPILLVCSLHASLEIFKQATMKALRKKSVLLTGYLEYLIKHNYGKDKAATKKPVVNIITPSHVEERGCQLTITFSVPNKDVFQELEKRGVVCDKRNPNGIRVAPVPLYNSFHDVYKFTNLLTSILDSAETKN

SEQ ID NO: 162 - protein, 592 aa, Homo sapiens
  misc_feature: Incyte ID No: 3173735CD1
MASEIHMTGPMCLIENTNGRLMANPEALKILSAITQPMVVVAIVGLYRTGKSYLMNKLAGKKKGFSLGSTVQSHTKGIWMWCVPHPKKPGHILVLLDTEGLGDVEKGDNQNDSWIFALAVLLSSTFVYNSIGTINQQAMDQLYYVTELTHRIRSKSSPDENENEVEDSADFVSFFPDFVWTLRDFSLDLEADGQPLTPDEYLTYSLKLKKGTSQKDETFNLPRLCIRKFFPKKKCFVFDRPVHRRKLAQLEKLQDEELDPEFVQQVADFCSYIFSNSKTKTLSGGIQVNGPRLESLVLTYVNAISSGDLPCMENAVLALAQIENSAAVQKAIAHYEQQMGQKVQLPTETLQELLDLHRDSEREAIEVFIRSSFKDVDHLFQKELAAQLEKKRDDFCKQNQEASSDRCSALLQVIFSPLEEEVKAGIYSKPGGYRLFVQKLQDLKKKYYEEPRKGIQAEEILQTYLKSKESMTDAILQTDQTLTEKEKEIEVERVKAESAQASAKMLQEMQRKNEQMMEQKERSYQEHLKQLTEKMENDRVQLLKEQERTLALKLQEQEQLLKEGFQKESRIMKNEIQDLQTKMRRRKACTIS

SEQ ID NO: 163 - protein, 478 aa, Homo sapiens
  misc_feature: Incyte ID No: 258971CD1
MSTNGDDHQVKDSLEQLRCHFTWELSIDDDEMPDLENRVLDQIEFLDTKYSVGIHNLLAYVKHLKGQNEEALKSLKEAENLMQEEHDNQANVRSLVTWGNFAWMYYHMGRLAEAQTYLDKVENICKKLSNPFRYRMECPEIDCEEGWALLKCGGKNYERAKACFEKVLEVDPENPESSAGYAISAYRLDGFKLATKNHKPFSLLPLRQAVRLNPDNGYIKVLLALKLQDEGQEAEGEKYIEEALANMSSQTYVFRYAAKFYRRKGSVDKALELLKKALQETPTSVLLHHQIGLCYKAQMIQIKEATKGQPRGQNREKLDKMIRSAIFHFESAVEKKPTFEVAHLDLARMYIEAGNHRKAEENFQKLLCMKPVVEETMQDIHFHYGRFQEFQKKSDVNAIIHYLKAIKIEQASLTRDKSINSLKKLVLRKLRRKALDLESLSLLGFVYKLEGNMNEALEYYERALRLAADFENSVRQGP

SEQ ID NO: 164 - protein, 771 aa, Homo sapiens [sequence omitted]

SEQ ID NO: 165 - protein, 551 aa, Homo sapiens
  misc_feature: Incyte ID No: 2874529CD1
MAGDLSAGFFMEELNTYRQKQGVVLKYQELPNSGPPHDRRFTFQVIIDGREFPEGEGRSKKEAKNAAAKLAVEILNKEKKAVSPLLLTTTNSSEGLSMGNYIGLINRIAQKKRLTVNYEQCASGVHGPEGFHYKCKMGQKEYSIGTGSTKQEAKQLAAKLAYLQILSEETSVKSDYLSSGSFATTCESQSNSLVTSTLASESSSEGDFSADTSEINSNSDSLNSSSLLMNGLRNNQRKAKRSLAPRFDLPDMKETKYTVDKRFGMDFKEIELIGSGGFGQVFKAKHRIDGKTYVIKRVKYNNEKAEREVKALAKLDHVNIVHYNGCWDGFDYDPETSDDSLESSDYDPENSKNSSRSKTKCLFIQMEFCDKGTLEQWIEKRRGEKLDKVLALELFEQITKGVDYIHSKKLIHRDLKPSNIFLVDTKQVKIGDFGLVTSLKNDGKRTRSKGTLRYMSPEQISSQDYGKEVDLYALGLILAELLHVCDTAFETSKFFTDLRDGIISDIFDKKEKTLLQKLLSKKPEDRPNTSEILRTLTVWKKSPEKNERHTC

SEQ ID NO: 166 - protein, 471 aa, Homo sapiens
  misc_feature: Incyte ID No: 2705515CD1
MPNSEPASLLELFNSIATQGELVRSLKAGNASKDEIDSAVKMLVSLKMSYKAAAGEDYKADCPPGNPAPTSNHGPDATEAEEDFVDPWTVQTSSAKGIDYDKLIVRFGSSKIDKELINRIERATGQRPHHFLRRGIFFSHRDMNQVLDAYENKKPFYLYTGRGPSSEAMHVGHLIPFIFTKWLQDVFNVPLVIQMTDDEKYLWKDLTLDQAYSYAVENAKDIIACGFDINKTFIFSDLDYMGMSSGFYKNVVKIQKHVTFNQVKGIFGFTDSDCIGKISFPAIQAAPSFSNSFPQIFRDRTDIQCLIPCAIDQDPYFRMTRDVAPRIGYPKPALLHSTFFPALQGAQTKMSASDPNSSIFLTDTAKQIKTKVNKHAFSGGRDTIEEHRQFGGNCDVDVSFMYLTFFLEDDDKLEQIRKDYTSGAMLTGELKKALIEVLQPLIAEHQARRKEVTDEIVKEFMTPRKLSFDFQ

SEQ ID NO: 167 - protein, 498 aa, Homo sapiens [sequence omitted]

SEQ ID NO: 168 - protein, 715 aa, Homo sapiens
  misc_feature: Incyte ID No: 1924205CD1
MSKAHKPWPYRRRSQFSSRKYLKKEMNSFQQQPPPFGTVPPQMMFPPNWQGAEKDAAFLAKDFNFLTLNNQPPPGNRSQPRAMGPENNLYSQYEQKVRPCIDLIDSLRALGVEQDLALPAIAVIGDQSSGKSSVLEALSGVALPRGSGIVTRCPLVLKLKKQPCEAWAGRISYRNTELELQDPGQVEKEIHKAQNVMAGNGRGISHELISLEITSPEVPDLTIIDLPGITRVAVDNQPRDIGLQIKALIKKYIQRQQTINLVVVPCNVDIATTEALSMAHEVDPEGDRTIGILTKPDLMDRGTEKSVMNVVRNLTYPLKKGYMIVKCRGQQEITNRLSLAEATKKEITFFQTHPYFRVLLEEGSATVPRLAERLTTELIMHIQKSLPLLEGQIRESHQKATEELRRCGADIPSQEADKMFFLIEKIKMFNQDIEKLVEGEEVVRENETRLYSKIREDFKNWVGILATNTQKVKNIIHEEVEKYEKQYRGKELLGFVNYKTFEIIVHQYIQQLVEPALSMLQKAMEIIQQAFINVAKKHFGEFFNLNQTVQSTIEDIKVKHTAKAENMIQLQFRMEQMVFCQDQIYSVVLKKVREEIFNPLGTPSQNMKLNSHFPSNESSVSSFTEIGIHLNAYFLETSKRLANQIPFIIQYFMLRENGDSLQKAMMQILQEKNRYSWLLQEQSETATKRRILKERIYRLTQARHALCQFSSKEIH

SEQ ID NO: 169 - protein, 109 aa, Homo sapiens
  misc_feature: Incyte ID No: 965517CD1
MLKLTPLPSKMKVSAALLCLLLMAATFSPQGLAQPDSVSIPITCCFNVINRKIPIQRLESYTRITNIQCPKEAVIFKTKRGKEVCADPKERWVRDSMKHLDQIFQNLKP

SEQ ID NO: 170 - protein, 181 aa, Homo sapiens
  misc_feature: Incyte ID No: 1795309CD1
MAGSREVVAMDCEMVGLGPHRESGLARCSLVNVHGAVLYDKFIRPEGEITDYRTRVSGVTPQHMVGATPFAVARLEILQLLKGKLVVGHDLKHDFQALKEDMSGYTIYDTSTDRLLWREAKLDHCRRVSLRVLSERLLHKSIQNSLLGHSSVEDARATMELYQISQRIRARRGLPRLAVSD

SEQ ID NO: 171 - protein, 926 aa, Homo sapiens
  misc_feature: Incyte ID No: 816792CD1
MDMFPLTWVFLALYFSRHQVRGQPDPPCGGRLNSKDAGYITSPGYPQDYPSHQNCEWIVYAPEPNQKIVLNFNPHFEIEKHDCKYDFIEIRDGDSESADLLGKHCGNIAPPTIISSGSMLYIKFTSDYARQGAGFSLRYEIFKTGSEDCSKNFTSPNGTIESPGFPEKYPHNLDCTFTILAKPKMEIILQFLIFDLEHDPLQVGEGDCKYDWLDIWDGIPHVGPLIGKYCGTKTPSELRSSTGILSLTFHTDMAVAKDGFSARYYLVHQEPLENFQCNVPLGMESGRIANEQISASSTYSDGRWTPQQSRLHGDDNGWTPNLDSNKEYLQVDLRFLTMLTAIATQGAISRETQNGYYVKSYKLEVSTNGEDWMVYRHGKNHKVFQANNDATEVVLNKLHAPLLTRFVRIRPQTWHSGIALRLELFGCRVTDAPCSNMLGMLSGLIADSQISASSTQEYLWSPSAARLVSSRSGWFPRIPQAQPGEEWLQVDLGTPKTVKGVIIQGARGGDSITAVEARAFVRKFKVSYSLNGKDWEYIQDPRTQQPKLFEGNMHYDTPDIRRFDPIPAQYVRVYPERWSPAGIGMRLEVLGCDWTDSKPTVETLGPTVKSEETTTPYPTEEEATECGENCSFEDDKDLQLPSGFNCNFDFLEEPCGWMYDHAKWLRTTWASSSSPNDRTFPDDRNFLRLQSDSQREGQYARLISPPVHLPRSPVCMEFQYQATGGRGVALQVVREASQESKLLWVIREDQGGEWKHGRIILPSYDMEYQIVFEGVIGKGRSGEIAIDDIRISTDVPLENCMEPISAFAVDIPEIHEREGYEDEIDDEYEVDWSNSSSATSGSGAPSTDKEKSWLYTLDPILITIIAMSSLGVLLGATCAGLLLYCTCSYSGLSSRSCTTLENYNFELYDGLKHKVKMNHQKCCSEA

SEQ ID NO: 172 - protein, 370 aa, Homo sapiens
  misc_feature: Incyte ID No: 3838440CD1
MEILMTVSKFASICTMGANASALEKEIGPEQFPVNEHYFGLVNFGNTCYCNSVLQALYFCRPFREKVLAYKSQPRKKESLLTCLADLFHSIATQKKKVGVIPPKKFITRLRKENELFDNYMQQDAHEFLNYLLNTIADILQEERKQEKQNGRLPNGNIDNENNNSTPDPTWVHEIFQGTLTNETRCLTCETISSKDEDFLDLSVDVEQNTSITHCLRGFSNTETLCSEYKYYCEECRSKQEAHKRMKVKKLPMILALHLKRFKYMDQLHRYTKLSYRVVFPLELRLFNTSGDATNPDRMYDLVAVVVHCGSGPNRGHYIAIVKSHDFWLLFDDDIVEKIDAQAIEEFYGLTSDISKNSESGYILFYQSRD

SEQ ID NO: 173 - protein, 206 aa, Homo sapiens
  misc_feature: Incyte ID No: 3282941CD1
MSTGSVSDPEEMELRGLQREYPVPASKRPPLRGVERSYASPSDNSSAEEEDPDGEEERCALGTAGSAEGCKRKRPRVAGGGGAGGSAGGGGKKPLPAKGSAAECKQSQRNAANARERARMRVLSKAFSRLKTSLPWVPPDTKLSKLDTLRLASSYIAHLRQLLQEDRYENGYVHPVNLTWPFVVSGRPDSDTKEVSAANRLCGTTA

SEQ ID NO: 174 - protein, 197 aa, Homo sapiens
  misc_feature: Incyte ID No: 5511889CD1
MHFRNFNYSFSSLIACVANSDIFSESETRAKFESLFRTYDKDITFQYFKSFKRVRINFSNPFSAADARLQLHKTEFLGKEMKLYFAQTLHIGSSHLAPPNPDKQFLISPPASPPVGWKQVEDATPVINYDLLYAISKLGPGEKYELHAATDTTPSVVVHVCESDQEKEEEEEMERMRRPKPKIIQTRRPEYTPIHLS

SEQ ID NO: 175 - protein, 598 aa, Homo sapiens
  misc_feature: Incyte ID No: 1671522CD1
MPCVQAQYGSSPQGASPASQSYSYHSSGEYSSDFLTPEFVKFSMDLTNTEITATTSLPSFSTFMDNYSTGYDVKPPCLYQMPLSGQQSSIKVEDIQMHNYQQHSHLPPQSEEMMPHSGSVYYKPSSPPTPTTPGFQVQHSPMWDDPGSLHNFHQNYVATTHMIEQRKTPVSRLSLFSFKQSPPGTPVSSCQMRFDGPLHVPMNPEPAGSHHVVDGQTFAVPNPIRKPASMGFPGLQIGHASQLLDTQVPSPPSRGSPSNEGLCAVCGDNAACQHYGVRTCEGCKGFFKRTVQKNAKYVCLANKNCPVDKRRRNRCQYCRFQKCLAVGMVKEVVRTDSLKGRRGRLPSKPKSPQEPSPPSPPVSLISALVRAHVDSNPAMTSLDYSRFQANPDYQMSGDDTQHIQQFYDLLTGSMEIIRGWAEKIPGFADLPKADQDLLFESAFLELFVLRLAYRSNPVEGKLIFCNGVVLHRLQCVRGFGEWIDSIVEFSSNLQNMNIDISAFSCIAALAMVTERHGLKEPKRVEELQNKIVNCLKDHVTFNNGGLNRPNYLSKLLGKLPELRTLCTQGLQRIFYLKLEDLVPPPAIIDKLFLDTLPF

SEQ ID NO: 176 - protein, 196 aa, Homo sapiens
  misc_feature: Incyte ID No: 2588008CD1
MPGMFFSANPKELKGTTHSLLDDKMQKRRPKTFGMDMKAYLRSMIPHLESGMKSSKSKDVLSAAEVMQWSQSLEKLLANQTGQNVFGSFLKSEFSEENIEFWLACEDYKKTESDLLPCKAEEIYKAFVHSDAAKQINIDFRTRESTAKKIKAPTPTCFDEAQKVIYTLMEKDSYPRFLKSDIYLNLLNDLQANSLK

SEQ ID NO: 177 - protein, 244 aa, Homo sapiens
  misc_feature: Incyte ID No: 1794550CD1
MKERRASQKLSSKSIMDPNQNVKCKIVVVGDSQCGKTALLHVFAKDCFPENYVPTVFENYTASFEIDTQRIELSLWDTSGSPYYDNVRPLSYPDSDAVLICFDISRPETLDSVLKKWKGEIQEFCPNTKMLLVGCKSDLRTDVSTLVELSNHRQTPVSYDQGANMAKQIGAATYIECSALQSENSVRDIFHVATLACVNKTNKNVKRNKSQRATKRISHMPSRPELSAVATDLRKDKAKSCTVM

SEQ ID NO: 178 - protein, 403 aa, Homo sapiens [sequence omitted]

SEQ ID NO: 179 - protein, 93 aa, Homo sapiens
  misc_feature: Incyte ID No: 003360CD1
MQVSTAALAVLLCTMALCNQVLSAPLAADTPTACCFSYTSRQIPQNFIADYFETSSQCSKPSVIFLTKRGRQVCADPSEEWVQKYVSDLELSA

SEQ ID NO: 180 - protein, 96 aa, Homo sapiens
  misc_feature: Incyte ID No: 088564CD1
MCCTKSLLLAALMSVLLLHLCGESEAASNFDCCLGYTDRILHPKFIVGFTRQLANEGCDINAIIFHTKKKLSVCANPKQTWVKYIVRLLSKKVKNM

SEQ ID NO: 181 - protein, 790 aa, Homo sapiens
  misc_feature: Incyte ID No: 1750533CD1
MAEQVLPQALYLSNMRKAVKIRERTPEDIFKPTNGIIHHFKTMHRYTLEMFRTCQFCPQFREIIHKALIDRNIQATLESQKKLNWCREVRKLVALKTNGDGNCLMHATSQYMWGVQDTDLVLRKALFSTLKETDTRNFKFRWQLESLKSQEFVETGLCYDTRNWNDEWDNLIKMASTDTPMARSGLQYNSLEEIHIFVLCNILRRPIIVISDKMLRSLESGSNFAPLKVGGIYLPLHWPAQECYRYPIVLGYDSHHFVPLVTLKDSGPEIRAVPLVNRDRGRFEDLKVHFLTDPENEMKEKLLKEYLMVIEIPVQGWDHGTTHLINAAKLDEANLPKEINLVDDYFELVQHEYKKWQENSEQGRREGHAQNPMEPSVPQLSLMDVKCETPNCPFFMSVNTQPLCHECSERRQKNQNKLPKLNSKPGPEGLPGMALGASRGEAYEPLAWNPEESTGGPHSAPPTAPSPFLFSETTAMKCRSPGCPFTLNVQHNGFCERCHNARQLHASHAPDHTRHLDPGKCQACLQDVTRTFNGICSTCFKRTTAEASSSLSTSLPPSCHQRSKSDPSRLVRSPSPHSCHRAGNDAPAGCLSQAARTPGDRTGTSKCRKAGCVYFGTPENKGFCTLCFIEYRENKHFAAASGKVSPTASRFQNTIPCLGRECGTLGSTMFEGYCQKCFIEAQNQRFHEAKRTEEQLRSSQRRDVPRTTQSTSRPKCARASCKNILACRSEELCMECQHPNQRMGPGAHRGEPAPEDPPKQRCRAPACDHFGNAKCNGYCNECFQFKQMYG

SEQ ID NO: 182 - protein, 233 aa, Homo sapiens
  misc_feature: Incyte ID No: 561301CD1
MSTESMIRDVELAEEALPKKTGGPQGSRRCLFLSLFSFLIVAGATTLFCLLHFGVIGPQREEFPRDLSLISPLAQAVRSSSRTPSDKPVAHVVANPQAEGQLQWLNRRANALLANGVELRDNQLVVPSEGLYLIYSQVLFKGQGCPSTHVLLTHTISRIAVSYQTKVNLLSAIKSPCQRETPEGAEAKPWYEPIYLGGVFQLEKGDRLSAEINRPDYLDFAESGQVYFGIIAL

SEQ ID NO: 183 - protein, 181 aa, Homo sapiens
  misc_feature: Incyte ID No: 828082CD1
MMLQHPGQVSASEVSASAIVPCLSPPGSLVFEDFANLTPFVKEELRFAIQNKHLCHRMSSALESVTVSDRPLGWSITKAEVAPEEDERKKRRRERNKIAAAKCRNKKKEKTECLQKESEKLESVNAELKAQIEELKNEKQHLIYMLNLHRPTCIVRAQNGRTPEDERNLFIQQIKEGTLQS

SEQ ID NO: 184 - protein, 175 aa, Homo sapiens [sequence omitted]

SEQ ID NO: 185 - protein, 277 aa, Homo sapiens
  misc_feature: Incyte ID No: 191918CD1
MIILIYLFLLLWEDTQGWGFKDGIFHNSIWLERAAGVYHREARSGKYKLTYAEAKAVCEFEGGHLATYKQLEAARKIGFHVCAAGWMAKGRVGYPIVKPGPNCGFGKTGIIDYGIRLNRSERWDAYCYNPHAKECGGVFTDPKQIFKSPGFPNEYEDNQICYWHIRLKYGQRIHLSFLDFDLEDDPGCLADYVEIYDSYDDVHGFVGRYCGDELPDDIISTGNVMTLKFLSDASVTAGGFQIKYVAMDPVSKSSQGKNTSTTSTGNKNFLAGRFSHL

SEQ ID NO: 186 - protein, 472 aa, Homo sapiens
  misc_feature: Incyte ID No: 154697CD1
MSENNKNSLESSLRQLKCHFTWNLMEGENSLDDFEDKVFYRTEFQNREFKATMCNLLAYLKHLKGQNEAALECLRKAEELIQQEHADQAEIRSLVTWGNYAWVYYHMGRLSDVQIYVDKVKHVCEKFSSPYRIESPELDCEEGWTRLKCGGNQNERAKVCFEKALEKKPKNPEFTSGLAIASYRLDNWPPSQNAIDPLRQAIRLNPDNQYLKVLLALKLHKMREEGEEEGEGEKLVEEALEKAPGVTDVLRSAAKFYRRKDEPDKAIELLKKALEYIPNNAYLHCQIGCCYRAKVFQVMNLRENGMYGKRKLLELIGHAVAHLKKADEANDNLFRVCSILASLHALADQYEDAEYYFQKEFSKELTPVAKQLLHLRYGNFQLYQMKCEDKAIHHFIEGVKINQKSREKKKMKDKLQKIAKMRLSKNGADSEALHVLAFLQELNEKMQQADEDSERGLESGSLIPSASSWNGE

What is claimed is:

1. A combination comprising a plurality of polynucleotides wherein the polynucleotides are SEQ ID NOs:1-127 and the complements of SEQ ID NOs:1-127.

2. The combination of claim 1, wherein each of the polynucleotides is differentially expressed in LPS-treated foam cells and is selected from:
a) SEQ ID NOs:16-105 and 109-127;
b) SEQ ID NOs:1-15 and 106-108; and
c) a complement of (a) or (b).

3. The combination of claim 1, wherein each of the polynucleotides is differentially expressed in LPS-treated foam cells and is selected from:
a) SEQ ID NOs:16-25, 50-63, and 71-88, and 109-111;
b) SEQ ID NO:26-38;
c) SEQ ID NOs:65-70, 100-105, 112-121;
d) SEQ ID NOs:122-127;
e) SEQ ID NOs:1-11 and 106-108; and
f) the complements of (a), (b), (c), (d), or (e).

4. The combination of claim 1, wherein the polynucleotides are immobilized on a substrate.

5. A high throughput method for detecting differential expression of one or more polynucleotides in a sample, the method comprising:
a) hybridizing the combination of claim 2 with the sample, thereby forming one or more hybridization complexes;
b) detecting the hybridization complexes; and
c) comparing the hybridization complexes with those of a standard, wherein each difference in the size and intensity of a hybridization complex indicates differential expression of a polynucleotide in the sample.

6. The method of claim 5, wherein the sample is from a subject with atherosclerosis and comparison with a standard defines early, mid, or late stages of the disorder.

7. A high throughput method of screening a library of molecules or compounds to identify a ligand which binds a polynucleotide, the method comprising:
a) combining the combination of claim 1 with the library under conditions to allow specific binding; and
b) detecting specific binding between the polynucleotide and a molecule or compound, thereby identifying a ligand that specifically binds to the polynucleotide.

8. The method of claim 7 wherein the library is selected from DNA molecules, peptides, proteins and RNA molecules.

9. A method of obtaining an extended or full length gene from a library of nucleic acid sequences, the method comprising:
a) arranging individual sequences on a substrate;
b) hybridizing a polynucleotide of claim 1 with the sequences under conditions which allow specific binding;
c) detecting hybridization between the polynucleotide and one or more sequences; and
d) isolating the sequences from the library, thereby obtaining extended or full length gene.

10. A purified polynucleotide having a nucleic acid sequence selected from SEQ ID NOs:51, 52, 54, 79, 85, 102, 106, and 119 or the complements of SEQ ID NOs:51, 52, 54, 79, 85, 102, 106, and 119.

11. An expression vector containing the polynucleotide of claim 10.

12. A host cell containing the expression vector of claim 11.

13. A purified polypeptide comprising an amino acid sequence of SEQ ID NOs:154 or 155.

14. A method for producing a protein, the method comprising the steps of:
a) culturing the host cell of claim 12 under conditions for the expression of protein; and
b) recovering the protein from the host cell culture.

15. A protein produced by the method of claim 14.

16. A high-throughput method for screening a library of molecules or compounds to identify at least one ligand which specifically binds a protein, the method comprising:
a) combining the protein or a portion thereof of claim 15 with the library under conditions to allow specific binding; and
b) detecting specific binding between the protein and a molecule or compound, thereby identifying a ligand which specifically binds the protein.

17. A method of purifying a ligand from a sample, the method comprising:
a) combining the protein of claim 15 with a sample under conditions to allow specific binding;
b) recovering the bound protein; and
c) separating the protein from the ligand, thereby obtaining purified ligand.

18. A method of making a antibody, the method comprising:
a) immunizing an animal with the protein of claim 15 under conditions to elicit an antibody response,
b) isolating animal antibodies, and
c) screening the isolated antibodies with the protein to identify an antibody that specifically binds the protein.

19. A composition comprising the protein of claim 15.

20. A purified antibody that specifically binds to the protein of claim 15.
